(19) United States
(12) Patent Application Publication
(10) Pub. No.: US 2025/0179483 A1
(43) Pub. Date: Jun. 5, 2025

(54) GENOME EDITING COMPOSITIONS AND METHODS FOR TREATMENT OF GLYCOGEN STORAGE DISEASE TYPE 1B

(71) Applicant: Prime Medicine, Inc., Cambridge, MA (US)

(72) Inventors: Christopher Austin Hart, Cambridge, MA (US); Jonathan M. Levy, Cambridge, MA (US)

(21) Appl. No.: 18/712,191

(22) PCT Filed: Nov. 23, 2022
(86) PCT No.: PCT/US22/50895

§ 371 Date: May 21, 2024

Related U.S. Application Data
(60) Provisional application No. 63/282,515, filed on Nov. 23, 2021.
(60) Provisional application No. 63/282,516, filed on Nov. 23, 2021.

(51) Int. Cl. C12N 15/11; C07K 14/47; C12N 9/12; C12N 9/22; C12N 15/88

(52) U.S. Cl. CPC C12N 15/111; C07K 14/4702; C12N 9/1276; C12N 9/22; C12N 15/88; C07K 2319/80; C12N 2310/20; C12Y 207/07049

(57) ABSTRACT

Provided herein are compositions and methods of using prime editing systems comprising prime editors and prime editing guide RNAs for treatment of genetic disorders.

### CROSS REFERENCE TO RELATED APPLICATIONS

[0001] This application is a § 371 national-stage application based on PCT/US2022/050895, filed Nov. 23, 2022, which claims the benefit of priority to U.S. Provisional Application No. 63/282,515, filed Nov. 23, 2021, and U.S. Provisional Application No. 63/282,516, filed Nov. 23, 2021, the entire contents of each are hereby incorporated by reference.

### REFERENCE TO SEQUENCE LISTING

[0002] The instant application contains a Sequence Listing which has been submitted electronically in XML format via EFS-Web, and is hereby incorporated by reference in its entirety. Said XML copy, created on Feb. 20, 2023, is named PMB-00725.xml and is 1,753,195 bytes in size is hereby incorporated by reference in its entirety.

### BACKGROUND

[0003] Diseases, such as Glycogen Storage Disease Type 1B, may be caused in humans by disruption to the SLC37A4 gene (OMIM #602671), and manifest with widespread systemic effects secondary to the liver's inability to break down glycogen. SLC37A4 encodes the glucose-6-phosphate transporter (or translocase) (G6PT1) protein, which contributes to glucose homeostasis by regulating glucose-6-phosphate transport from the cytoplasm to the lumen of the endoplasmic reticulum. SLC37A4 is located in the human genome at 11q23.3 (chr11:119,024,111-119,030,876 (GRCh38/hg38)). The predominant isoform of G6PT1 is a 429-amino acid protein (GenBank accession CAA75608.1, SEQ ID NO: 1; cDNA sequence NM_001164277.2, SEQ ID NO:2). A frequent disease-causing mutation of SLC37A4 is G339C, in which a G-to-T transversion at position 1015 of the coding sequence in exon 8 (Chr11:119025299, GRCh38) causes a missense mutation in codon 339 from glycine (GGT) to cysteine (TGT). Another frequent disease-causing mutation of SLC37A4 is c.1042-1043delCT (L348fs), in which the deletion of two nucleotides (CT) at positions 1042-1043 of the SLC37A4 coding sequence causes a frameshift mutation that persists for 61 incorrect amino acid residues and terminates with a stop codon after amino acid 400.

### SUMMARY

[0004] Glycogen storage disease type 1B can be treated by gene editing because the G339C mutation or L348fs mutation in the SLC37A4 gene is amenable to prime editing, methods and compositions for which are described herein. The G339C mutation in SLC37A4 may be corrected, for example, by a T->G edit at position 1015 of the coding sequence, thus restoring the missense mutation to wild-type. The L348fs mutation in SLC37A4 may be corrected, for example, by insertion of CT at position 1042 of the coding sequence, thus restoring the frameshift mutation to wild-type.

[0005] Provided herein, in some embodiments, are methods and compositions for prime editing of alterations in a target sequence in a target gene, for example, the SLC37A4 gene. The target SLC37A4 gene may comprise double stranded DNA. As exemplified in FIG. 1, in an embodiment, the target gene is edited by prime editing.

[0006] Without wishing to be bound by any particular theory, the prime editing process may search specific targets and edit endogenous sequences in a target gene, e.g., the SLC37A4 gene. As exemplified in FIG. 1, the spacer sequence of a PEgRNA recognizes and anneals with a search target sequence in a target strand of the target gene. A prime editing complex may generate a nick in the target gene on the edit strand which is the complementary strand of the target strand. The prime editing complex may then use a free 3′ end formed at the nick site of the edit strand to initiate DNA synthesis, where a primer binding site (PBS) of the PEgRNA complexes with the free 3′ end, and a single stranded DNA is synthesized using an editing template of the PEgRNA as a template. The editing template may comprise one or more nucleotide edits compared to the endogenous target SLC37A4 gene sequence. Accordingly, the newly-synthesized single stranded DNA also comprises the nucleotide edit(s) encoded by the editing template. Through removal of an editing target sequence on the edit strand of the target gene and DNA repair, the intended nucleotide edit(s) included in the newly synthesized single stranded DNA are incorporated into the target SLC37A4 gene.

[0007] Therefore, in some aspects, provided herein are prime editing guide RNAs (PEgRNAs) comprising a spacer (e.g., an spacer disclosed herein) that comprises a region of complementarity to a search target sequence on a target strand of an SLC37A4 gene, an editing template (e.g., an editing template disclosed herein) that comprises a region of complementarity to an editing target sequence on a non-target strand of the SLC37A4 gene, and a gRNA core that associates with a prime editor comprising a DNA binding domain and a DNA polymerase domain, wherein the target strand and the non-target strand are complementary to each other, and wherein the editing target sequence is in exon 8 of the SLC37A4 gene.

[0008] In some aspects, provided herein are PEgRNAs comprising a spacer (e.g., an spacer disclosed herein) that comprises a region of complementarity to a search target sequence on a target strand of an SLC37A4 gene, an editing template (e.g., an editing template disclosed herein) that comprises a region of complementarity to an editing target sequence on a non-target strand of the SLC37A4 gene, and a gRNA core that associates with a prime editor comprising a DNA binding domain and a DNA polymerase domain, wherein target strand and the non-target strand are complementary to each other. In some embodiments, the editing target sequence comprises a codon encoding cysteine at position 339. In some embodiments, the editing target sequence comprises a 2-nucleotide deletion corresponding to positions 1042-1043 of a coding sequence of an SLC37A4 wild-type gene. In some embodiments, the editing target sequence comprises a codon encoding cysteine corresponding to position 339 of a SLC37A4 wild-type peptide.

[0009] In some aspects, provided herein are PEgRNAs comprising a spacer (e.g., an spacer disclosed herein) that comprises a region of complementarity to a search target sequence on a target strand of an SLC37A4 gene, an editing template (e.g., an editing template disclosed herein) that comprises a region of complementarity to an editing target sequence on a non-target strand of the SLC37A4 gene, and a gRNA core that associates with a prime editor comprising a DNA binding domain and a DNA polymerase domain, wherein the target strand and the non-target strand are complementary to each other, and wherein the editing target sequence i) comprises position 1015 of the SLC37A4 gene coding sequence; and/or ii) position 1042 of a SLC37A4 gene coding sequence.

[0010] In some embodiments, the editing target sequence comprises position 1015 of a SLC37A4 gene coding sequence. In some embodiments, the editing target sequence comprises position 1042 of a SLC37A4 gene coding sequence.

[0011] In some aspects, provided herein are PEgRNAs comprising a spacer that comprises a region of complementarity to a search target sequence on a target strand of a SLC37A4 gene, an editing template (e.g., an editing template disclosed herein) that comprises a region of complementarity to an editing target sequence on a non-target strand of the SLC37A4 gene, and a gRNA core that associates with a prime editor comprising a DNA binding domain and a DNA polymerase domain, wherein the target strand and the non-target strand are complementary to each other, wherein the editing target sequence comprises i) a T at position 1015 of the SLC37A4 gene coding sequence, and/or ii) a deletion at positions 1042-1043 of a SLC37A4 gene coding sequence.

[0012] In some embodiments, the editing target sequence comprises a T at position 1015 of a SLC37A4 gene coding sequence. In some embodiments, the editing target sequence comprises a deletion at positions 1042-1043 of a SLC37A4 gene coding sequence.

[0013] In some embodiments, the editing template is about 3 to 40 nucleotides in length. In some embodiments, the editing template is about 10 to 30 nucleotides in length. In some embodiments, the editing template comprises a region of complementarity to a region downstream of a nick site in the non-target strand.

[0014] In some embodiments, the gRNA core is between the spacer and the editing template.

[0015] In some embodiments, the PEgRNA comprises a primer binding site (PBS) that comprises a region of complementarity to a region upstream of a nick site in the non-target strand. In some embodiments, the PBS comprises a region of complementarity to a region immediately upstream of a nick site in the non-target strand.

[0016] In some embodiments, the PBS and the editing template are directly adjacent to each other. In some embodiments, the PBS is comprises partial complementary, or full complementary, to the spacer. In some embodiments, the PBS is about 2 to 20 nucleotides in length (e.g., such as 8-16 nucleotides in length). In some embodiments, the editing template comprises an intended nucleotide edit compared to the SLC37A4 gene. In some embodiments, the PEgRNA guides the prime editor to incorporate the intended nucleotide edit into the SLC37A4 gene when contacted with the SLC37A4 gene.

[0017] In some embodiments, the prime editor synthesizes a single stranded DNA encoded by the editing template, wherein the single stranded DNA replaces the editing target sequence and results in incorporation of the intended nucleotide edit into a region corresponding to the editing target in the SLC37A4 gene. In some embodiments, the search target sequence is complementary to a protospacer sequence in the SLC37A4 gene, and the protospacer sequence is adjacent to a search target adjacent motif (PAM) in the SLC37A4 gene.

[0018] In some embodiments, the PEgRNA guides the prime editor to incorporate the intended nucleotide edit in the PAM when contacted with the SLC37A4 gene.

[0019] In some embodiments, the PEgRNA guides the prime editor to incorporate the intended nucleotide edit about 0 to 27 base pairs downstream of the 5′ end of the PAM when contacted with the SLC37A4 gene.

[0020] In some embodiments, the intended nucleotide edit comprises a single nucleotide substitution compared to the region corresponding to the editing target sequence in the SLC37A4 gene. In some embodiments, the editing target sequence comprises a mutation that encodes a cysteine amino acid substitution as compared to a wild type SLC37A4 protein as set forth in SEQ ID NO: 1. In some embodiments, the intended nucleotide edit comprises a T>G nucleotide substitution at position 1015 in the coding sequence of the SLC37A4 gene.

[0021] In some embodiments, the intended nucleotide edit comprises an insertion of two nucleotides compared to the region corresponding to the editing target in the SLC37A4 gene. In some embodiments, the editing target sequence comprises a frameshift mutation beginning at amino acid position L348 compared to a wild type SLC37A4 protein as set forth in SEQ ID NO: 1. In some embodiments, the intended nucleotide edit comprises a CT insertion at position 1042 in a coding sequence of the SLC37A4 gene.

[0022] In some embodiments, wherein the editing target sequence comprises a mutation associated with Glycogen storage disease type 1B. In some embodiments, wherein the editing template comprises a wild type SLC37A4 gene sequence. In some embodiments, the PEgRNA results in correction of the mutation when contacted with the SLC37A4 gene.

[0023] In some embodiments, the spacer comprises a sequence listed in Table 8.

[0024] In some embodiments, the editing template comprises a sequence listed in Table 9a, Table 10a, Table 11a, Table 12a, Table 13a, Table 14a, Table 15a, Table 16a, Table 17a, Table 18a, Table 19a, Table 20a, Table 21a, Table 22a, Table 23a, and Table 24a.

[0025] In some embodiments, the PBS comprises a sequence listed in Table 9b, Table 10b, Table 11b, Table 12b, Table 13b, Table 14b, Table 15b, Table 16b, Table 17b, Table 18b, Table 19b, Table 20b, Table 21b, Table 22b, Table 23b, and Table 24b.

[0026] In some embodiments, the spacer comprises the sequence of S01, the editing template comprises a sequence listed in Table 9a, and the PBS comprises a sequence listed in Table 9b. In some embodiments, the spacer comprises the sequence of S02, the editing template comprises a sequence listed in Table 10a, and the PBS comprises a sequence listed in Table 10b. In some embodiments, the spacer comprises the sequence of S03, the editing template comprises a sequence listed in Table 11a, and the PBS comprises a sequence listed in Table 11b. In some embodiments, the spacer comprises the sequence of S04, the editing template comprises a sequence listed in Table 12a, and the PBS comprises a sequence listed in Table 12b. In some embodiments, the spacer comprises the sequence of S05, the editing template comprises a sequence listed in Table 13a, and the PBS comprises a sequence listed in Table 13b. In some embodiments, the spacer comprises the sequence of S06, the editing template comprises a sequence listed in Table 14a, and the PBS comprises a sequence listed in Table 14b. In some embodiments, the spacer comprises the sequence of S07, the editing template comprises a sequence listed in Table 15a, and the PBS comprises a sequence listed in Table 15b. In some embodiments, the spacer comprises the sequence of S08, the editing template comprises a sequence listed in Table 16a, and the PBS comprises a sequence listed in Table 16b. In some embodiments, the spacer comprises the sequence of S09, the editing template comprises a sequence listed in Table 17a, and the PBS comprises a sequence listed in Table 17b. In some embodiments, the spacer comprises the sequence of S10, the editing template comprises a sequence listed in Table 18a, and the PBS comprises a sequence listed in Table 18b. In some embodiments, the spacer comprises the sequence of S11, the editing template comprises a sequence selected from the editing template sequences listed in Table 19a, and the PBS comprises a sequence selected from the PBS sequences listed in Table 19b. In some embodiments, the spacer comprises the sequence of S12, the editing template comprises a sequence selected from the editing template sequences listed in Table 20a, and the PBS comprises a sequence selected from the PBS sequences listed in Table 20b. In some embodiments, the spacer comprises the sequence of S13, the editing template comprises a sequence selected from the editing template sequences listed in Table 21a, and the PBS comprises a sequence selected from the PBS sequences listed in Table 21b. In some embodiments, the spacer comprises the sequence of S14, the editing template comprises a sequence selected from the editing template sequences listed in Table 22a, and the PBS comprises a sequence selected from the PBS sequences listed in Table 22b. In some embodiments, the spacer comprises the sequence of S15, the editing template comprises a sequence selected from the editing template sequences listed in Table 23a, and the PBS comprises a sequence selected from the PBS sequences listed in Table 23b. In some embodiments, the spacer comprises the sequence of S16, the editing template comprises a sequence selected from the editing template sequences listed in Table 24a, and the PBS comprises a sequence selected from the PBS sequences listed in Table 24b.

[0027] One embodiment of this disclosure provides a PEgRNA comprising an RTT and a PBS sequence listed in Table 9c, Table 10c, Table 11c, Table 12c, Table 13c, Table 14c, Table 15c, Table 16c, Table 17c, Table 18c, Table 19c, Table 20c, Table 21c, Table 22c, Table 23c, or Table 24c.

[0028] In some embodiments, the intended nucleotide edit comprises an insertion of CT at position 1042 in the coding sequence of the SLC37A4 gene. In some embodiments, the spacer comprises the sequence of S07 and the editing template comprises a sequence selected from the editing template sequences listed in Table 15a. In some embodiments, the spacer comprises the sequence of S08 and the editing template comprises a sequence selected from the editing template sequences listed in Table 16a. In some embodiments, the spacer comprises the sequence of S09 and the editing template comprises a sequence selected from the editing template sequences listed in Table 17a. In some embodiments, the spacer comprises the sequence of S10 and the editing template comprises a sequence selected from the editing template sequences listed in Table 18a. In some embodiments, the intended nucleotide edit comprises a T>G nucleotide substitution at position 1015 in the coding sequence of the SLC37A4 gene. In some embodiments, the spacer comprises the sequence of S12 and the editing template comprises a sequence selected from the editing template sequences listed in Table 20a. In some embodiments, the spacer comprises the sequence of S13 and the editing template comprises a sequence selected from the editing template sequences listed in Table 21a.

[0029] One embodiment of this disclosure provides a PEgRNA system comprising the PEgRNA according to an embodiment disclosed herein and further comprising a nick guide RNA (ngRNA), wherein the ngRNA comprises an ng spacer that comprises a region of complementarity to a second search target sequence in the SLC37A4 gene.

[0030] In some embodiments, the second search target sequence is on the non-target strand of the SLC37A4 gene. In some embodiments, the ng spacer comprises a sequence listed in Table 8a, Table 8b, Table 8c, or Table 8d.

[0031] One embodiment of this disclosure provides a PEgRNA system comprising a PEgRNA comprising an RTT and a PBS sequence listed in Tables 9c, 10c, 11c, 12c, 13c, or 14c and an ngRNA comprising a sequence listed in Table 8a. In some embodiments, the PEgRNA comprises RTT and PBS sequences listed in Tables 15c, 16c, 17c, or 18c and the ngRNA comprises a sequence listed in Table 8b.

[0032] One embodiment of this disclosure provides a PEgRNA system comprising a PEgRNA comprising a combination of an RTT and a PBS sequence as listed in Tables 19c, 20c, 21c, 22c, 23c, or 24c and an ngRNA comprising a sequence selected from the ngRNA sequences listed in Table 8c or Table 8d.

[0033] In some embodiments, a PEgRNA that corrects the G339C mutation, if present, can also correct a nearby mutation, L348fs, in which the deletion of two nucleotides (CT) at positions 1042-1043 of the SLC37A4 coding sequence causes a frameshift mutation that persists for 61 incorrect amino acid residues and terminates with a stop codon after amino acid 400. PEgRNAs having the sequences of spacers S07, S08, S09, or S10, and RTT sequences selected from SEQ ID NO: 180 through SEQ ID NO: 241 (i.e., Tables 15a, 16a, 17a, and 18a, for the respective spacers) are capable of editing one or both G339C and L348fs mutations. Examples include PEG-0781 through PEG-1203 (comprising the RTT and PBS combinations as provided in Tables 15c, 16c, 17c, and 18c).

[0034] One embodiment of this disclosure provides a prime editing complex comprising: (i) a PEgRNA disclosed herein and (ii) a prime editor comprising a DNA binding domain and a DNA polymerase domain.

[0035] In some embodiments, the DNA binding domain is a CRISPR associated (Cas) protein domain. In some embodiments, the Cas protein domain has nickase activity. In some embodiments, the Cas protein domain is a Cas9. In some embodiments, the Cas9 comprises a mutation in an HNH domain. In some embodiments, the Cas9 comprises a H840A mutation in the HNH domain. In some embodiments, the Cas protein domain is a Cas12b. In some embodiments, the Cas protein domain is a Cas12a, Cas12b, Cas12c, Cas12d, Cas12e, Cas14a, Cas14b, Cas14c, Cas14d, Cas14e, Cas14f, Cas14g, Cas14h, Cas14u, or a Casφ.

[0036] In some embodiments, the DNA polymerase domain is a reverse transcriptase. In some embodiments, the reverse transcriptase is a retrovirus reverse transcriptase. In some embodiments, the reverse transcriptase is a Moloney murine leukemia virus (M-MLV) reverse transcriptase. In some embodiments, the DNA polymerase and the DNA binding domain are fused or linked to form a fusion protein. In some embodiments, the fusion protein comprises the sequence of SEQ ID NO: 53.

[0037] One embodiment of this disclosure provides a lipid nanoparticle (LNP) or ribonucleoprotein (RNP) comprising the prime editing complex of an embodiment disclosed herein or a component thereof.

[0038] One embodiment of this disclosure provides a polynucleotide encoding the PEgRNA of an embodiment disclosed herein, the PEgRNA system of an embodiment disclosed herein, or the fusion protein of an embodiment disclosed herein.

[0039] In some embodiments, the polynucleotide is an mRNA. In some embodiments, the polynucleotide is operably linked to a regulatory element. In some embodiments, the regulatory element is an inducible regulatory element. One embodiment of this disclosure provides a vector comprising the polynucleotide of an embodiment disclosed herein. In some embodiments, the vector is an AAV vector.

[0040] One embodiment of this disclosure provides an isolated cell comprising the PEgRNA of an embodiment disclosed herein, the PEgRNA system of an embodiment disclosed herein, the prime editing complex of an embodiment disclosed herein, the LNP or RNP of an embodiment disclosed herein, the polynucleotide of an embodiment disclosed herein, or the vector of an embodiment disclosed herein.

[0041] One embodiment of this disclosure provides a pharmaceutical composition comprising (i) the PEgRNA of an embodiment disclosed herein, the PEgRNA system of an embodiment disclosed herein, the prime editing complex of an embodiment disclosed herein, the LNP or RNP of an embodiment disclosed herein, the polynucleotide of an embodiment disclosed herein, the vector of an embodiment disclosed herein, or the cell of an embodiment disclosed herein; and (ii) a pharmaceutically acceptable carrier.

[0042] One embodiment of this disclosure provides a method for editing an SLC37A4 gene, the method comprising contacting the SLC37A4 gene with (i) a PEgRNA disclosed herein or the PEgRNA system disclosed herein and (ii) a prime editor comprising a DNA binding domain and a DNA polymerase domain, wherein the PEgRNA directs the prime editor to incorporate the intended nucleotide edit in the SLC37A4 gene, thereby editing the SLC37A4 gene.

[0043] One embodiment of this disclosure provides a method for editing an SLC37A4 gene, the method comprising contacting the SLC37A4 gene with the prime editing complex of an embodiment disclosed herein, wherein the PEgRNA directs the prime editor to incorporate the intended nucleotide edit in the SLC37A4 gene, thereby editing the SLC37A4 gene.

[0044] In some embodiments, the prime editor synthesizes a single stranded DNA encoded by the editing template, wherein the single stranded DNA replaces the editing target sequence and results in incorporation of the intended nucleotide edit into a region corresponding to the editing target in the SLC37A4 gene.

[0045] In some embodiments, the SLC37A4 gene is in a cell. In some embodiments, the cell is a mammalian cell. In some embodiments, the cell is a human cell. In some embodiments, the cell is a primary cell. In some embodiments, the cell is a liver cell. In some embodiments, the cell is a hepatocyte. In some embodiments, the cell is a cholangiocyte. In some embodiments, the cell is a kidney cell. In some embodiments, the cell is a proximal tubule cell. In some embodiments, the cell is a Müller cell. In some embodiments, the cell is in a subject. In some embodiments, the subject is a human.

[0046] In some embodiments, the cell is from a subject having Glycogen storage disease type 1B. In some embodiments, the method further comprises administering the cell to the subject after incorporation of the intended nucleotide edit.

[0047] One embodiment of this disclosure provides a cell generated by the method of an embodiment disclosed herein.

[0048] One embodiment of this disclosure provides a population of cells generated by the method of an embodiment disclosed herein.

[0049] One embodiment of this disclosure provides a method for treating Glycogen storage disease type 1B in a subject in need thereof, the method comprising administering to the subject (i) a PEgRNA disclosed herein or a PEgRNA system disclosed herein and (ii) a prime editor comprising a DNA binding domain and a DNA polymerase domain, wherein the PEgRNA directs the prime editor to incorporate the intended nucleotide edit in the SLC37A4 gene in the subject, thereby treating Glycogen storage disease type 1B in the subject.

[0050] One embodiment of this disclosure provides a method for treating Glycogen storage disease type 1B in a subject in need thereof, the method comprising administering to the subject the prime editing complex of an embodiment disclosed herein, the LNP or RNP of an embodiment disclosed herein, or the pharmaceutical composition of an embodiment disclosed herein, wherein the PEgRNA directs the prime editor to incorporate the intended nucleotide edit in the SLC37A4 gene in the subject, thereby treating Glycogen storage disease type 1B in the subject.

[0051] In some embodiments, the subject is a human. In some embodiments, the SLC37A4 gene in the subject comprises a mutation that encodes a G339C amino acid substitution as compared to a wild type SLC37A4 protein as set forth in SEQ ID NO: 1. In some embodiments, the SLC37A4 gene comprises a mutation that encodes an G339C amino acid substitution as compared to a wild type SLC37A4 protein as set forth in SEQ ID NO: 1.

[0052] In some embodiments, the SLC37A4 gene (e.g., a gene in the subject) comprises a mutation that encodes a L348fs amino acid frameshift mutation as compared to a wild type SLC37A4 protein as set forth in SEQ ID NO: 1. In some embodiments, the SLC37A4 gene comprises a mutation that has a 2-nucleotide CT deletion at coding sequence position 1042 as compared to a wild type SLC37A4 gene.

### INCORPORATION BY REFERENCE

[0053] All publications, patents, and patent applications mentioned in this specification are herein incorporated by reference to the same extent as if each individual publication, patent, or patent application was specifically and individually indicated to be incorporated by reference.

### BRIEF DESCRIPTION OF THE DRAWINGS

[0054] FIG. 1 depicts a schematic of a prime editing guide RNA (PEgRNA) binding to a double stranded target DNA sequence.

[0055] FIG. 2 depicts a PEgRNA architectural overview in an exemplary schematic of PEgRNA designed for a prime editor.

[0056] FIG. 3 is a schematic showing the spacer and gRNA core part of an exemplary guide RNA, in two separate molecules. The rest of the PEgRNA structure is not shown.

### DETAILED DESCRIPTION

[0057] Provided herein, in some embodiments, are compositions and methods to edit the target gene SLC37A4 with prime editing. In certain embodiments, provided herein are compositions and methods for correction of mutations in the SLC37A4 gene associated with Glycogen storage disease type 1B. Compositions provided herein can comprise prime editors (PEs) that may use engineered guide polynucleotides, e.g., prime editing guide RNAs (PEgRNAs), that can direct PEs to specific DNA targets and can encode DNA edits on the target gene SLC37A4 that serve a variety of functions, including direct correction of disease-causing mutations.

[0058] The following description and examples illustrate embodiments of the present disclosure in detail. It is to be understood that this disclosure is not limited to the particular embodiments described herein and as such can vary. Those of skill in the art will recognize that there are numerous variations and modifications of this disclosure, which are encompassed within its scope. Although various features of the present disclosure can be described in the context of a single embodiment, the features can also be provided separately or in any suitable combination. Conversely, although the present disclosure can be described herein in the context of separate embodiments for clarity, the present disclosure can also be implemented in a single embodiment.

### Definitions

[0059] Unless defined otherwise, all technical and scientific terms used herein have the same meaning as is commonly understood by one of ordinary skill in the art.

[0060] The terminology used herein is for the purpose of describing particular embodiments only and is not intended to be limiting. As used herein, the singular forms “a”, “an” and “the” are intended to include the plural forms as well, unless the context clearly indicates otherwise. Furthermore, to the extent that the terms “including”, “includes”, “having”, “has”, “with”, or variants thereof as used herein mean “comprising”.

[0061] Unless otherwise specified, the words “comprising”, “comprise”, “comprises”, “having”, “have”, “has”, “including”, “includes”, “include”, “containing”, “contains,” “contain,” and variants thereof are inclusive or open-ended and do not exclude additional, unrecited elements or method steps.

[0062] Reference to “some embodiments”, “an embodiment”, “one embodiment”, or “other embodiments” means that a particular feature or characteristic described in connection with the embodiments is included in at least one or more embodiments, but not necessarily all embodiments, of the present disclosure.

[0063] The term “about” or “approximately” means within an acceptable error range for the particular value as determined by one of ordinary skill in the art, which will depend in part on how the value is measured or determined, i.e, the limitations of the measurement system. For example, “about” can mean within 1 standard deviation, per the practice in the art. Alternatively, “about” can mean a range of up to 20%, up to 10%, up to 5%, or up to 1% of a given value. Alternatively, particularly with respect to biological systems or processes, the term can mean within an order of magnitude, preferably within 5-fold, and more preferably within 2-fold, of a value. Where particular values are described in the application and claims, unless otherwise stated, the term “about” meaning within an acceptable error range for the particular value should be assumed.

[0064] As used herein, a “cell” can generally refer to a biological cell. A cell can be the basic structural, functional and/or biological unit of a living organism. A cell can originate from any organism having one or more cells. Some non-limiting examples include: a prokaryotic cell, eukaryotic cell, a bacterial cell, an archaeal cell, a cell of a single-cell eukaryotic organism, a protozoa cell, a cell from a plant, an animal cell, a cell from an invertebrate animal (e.g. fruit fly, cnidarian, echinoderm, nematode, etc.), a cell from a vertebrate animal (e.g., fish, amphibian, reptile, bird, mammal), a cell from a mammal (e.g., a pig, a cow, a goat, a sheep, a rodent, a rat, a mouse, a non-human primate, a human, etc.), et cetera. Sometimes a cell may not originate from a natural organism (e.g., a cell can be synthetically made, sometimes termed an artificial cell).

[0065] In some embodiments, the cell is a human cell. A cell may be of or derived from different tissues, organs, and/or cell types. In some embodiments, the cell is a primary cell. In some embodiments, the term primary cell means a cell isolated from an organism, e.g., a mammal, which is grown in tissue culture (i.e., in vitro) for the first time before subdivision and transfer to a subculture. In some non-limiting examples, mammalian primary cells can be modified through introduction of one or more polynucleotides, polypeptides, and/or prime editing compositions (e.g., through transfection, transduction, electroporation and the like) and further passaged. Such modified mammalian primary cells include retinal cells (e.g., photoreceptors, retinal pigment epithelium cells, Müller cells), epithelial cells (e.g., mammary epithelial cells, intestinal epithelial cells, hepatocytes), endothelial cells, glial cells, neural cells, hair cells, formed elements of the blood (e.g., lymphocytes, bone marrow cells), precursors of any of these somatic cell types, and stem cells. In some embodiments, the cell is a fibroblast. In some embodiments, the cell is a stem cell. In some embodiments, the cell is a pluripotent stem cell. In some embodiments, the cell is an induced pluripotent stem cell (iPSC). In some embodiments, the cell is a retinal progenitor cell. In some embodiments, the cell is a retinal precursor cell. In some embodiments, the cell is an embryonic stem cell (ESC). In some embodiments, the cell is a human stem cell. In some embodiments, the cell is a human pluripotent stem cell. In some embodiments, the cell is a human fibroblast. In some embodiments, the cell is an induced human pluripotent stem cell. In some embodiments, the cell is a human stem cell. In some embodiments, the cell is a human embryonic stem cell. In some embodiments, the cell is a human retinal progenitor cell. In some embodiments, the cell is a human retinal precursor cell.

[0066] In some embodiments, a cell is not isolated from an organism but forms part of a tissue or organ of an organism, e.g., a mammal, such as a human. In some non-limiting examples, mammalian cells include muscle cells (e.g., cardiac muscle cells, smooth muscle cells, myosatellite cells), epithelial cells (e.g., mammary epithelial cells, intestinal epithelial cells, hepatocytes), endothelial cells, glial cells, neural cells, formed elements of the blood (e.g., lymphocytes, bone marrow cells), precursors of any of these somatic cell types, and stem cells. In some embodiments, the cell is a liver cell. In some embodiments, the cell is a hepatocyte. In some embodiments, the cell is a cholangiocyte. In some embodiments, the cell is a kidney cell. In some embodiments, the cell is a proximal tubule cell. In some embodiments, the cell is a Müller cell. In some embodiments, the cell is a human stem cell.

[0067] In some embodiments, the cell is a differentiated cell. In some embodiments, cell is a fibroblast. In some embodiments, the cell is differentiated from an induced pluripotent stem cell. In some embodiments, the cell is any of a liver cell, a hepatocyte, or a cholangiocyte differentiated from an iPSC, ESC or a liver progenitor cell.

[0068] In some embodiments, the cell is a differentiated human cell. In some embodiments, cell is a human fibroblast. In some embodiments, the cell is differentiated from an induced human pluripotent stem cell. In some embodiments, the cell is any of a liver cell, a hepatocyte, or a cholangiocyte differentiated from a human iPSC, a human ESC or a human retinal progenitor cell.

[0069] In some embodiments, the cell comprises a prime editor or a prime editing composition. In some embodiments, the cell is from a human subject. In some embodiments, the human subject has a disease or condition associated with a mutation to be corrected by prime editing, for example, Glycogen storage disease type 1B. In some embodiments, the cell is from a human subject, and comprises a prime editor or a prime editing composition for correction of the mutation. In some embodiments, the cell is from the human subject and the mutation has been edited or corrected by prime editing. In some embodiments, the cell is in a human subject, and comprises a prime editor or a prime editing composition for correction of the mutation. In some embodiments, the cell is from the human subject and the mutation has been edited or corrected by prime editing.

[0070] The term “substantially” as used herein may refer to a value approaching 100% of a given value. In some embodiments, the term may refer to an amount that may be at least about 70%, 80%, 90%, 91%, 92%, 93%, 94%, 95%, 96%, 97%, 98%, 99%, 99.9%, or 99.99% of a total amount. In some embodiments, the term may refer to an amount that may be about 100% of a total amount.

[0071] The terms “protein” and “polypeptide” can be used interchangeably to refer to a polymer of two or more amino acids joined by covalent bonds (e.g., an amide bond) that can adopt a three-dimensional conformation. In some embodiments, a protein or polypeptide comprises at least 10 amino acids, 15 amino acids, 20 amino acids, 30 amino acids or 50 amino acids joined by covalent bonds (e.g., amide bonds). In some embodiments, a protein comprises at least two amide bonds. In some embodiments, a protein comprises multiple amide bonds. In some embodiments, a protein comprises an enzyme, enzyme precursor proteins, regulatory protein, structural protein, receptor, nucleic acid binding protein, a biomarker, a member of a specific binding pair (e.g., a ligand or aptamer), or an antibody. In some embodiments, a protein may be a full-length protein (e.g., a fully processed protein having certain biological function). In some embodiments, a protein may be a variant or a fragment of a full-length protein. For example, in some embodiments, a Cas9 protein domain comprises an H840A amino acid substitution compared to a naturally occurring S. pyogenes Cas9 protein. A variant of a protein or enzyme, for example a variant reverse transcriptase, comprises a polypeptide having an amino acid sequence that is about 60% identical, about 70% identical, about 80% identical, about 90% identical, about 95% identical, about 96% identical, about 97% identical, about 98% identical, about 99% identical, about 99.5% identical, or about 99.9% identical to the amino acid sequence of a reference protein.

[0072] In some embodiments, a protein comprises one or more protein domains or subdomains. As used herein, the term “polypeptide domain”, “protein domain”, or “domain” when used in the context of a protein or polypeptide, refers to a polypeptide chain that has one or more biological functions, e.g., a catalytic function, a protein-protein binding function, or a protein-DNA function. In some embodiments, a protein comprises multiple protein domains. In some embodiments, a protein comprises multiple protein domains that are naturally occurring. In some embodiments, a protein comprises multiple protein domains from different naturally occurring proteins. For example, in some embodiments, a prime editor may be a fusion protein comprising a Cas9 protein domain of S. pyogenes and a reverse transcriptase protein domain of Moloney murine leukemia virus. A protein that comprises amino acid sequences from different origins or naturally occurring proteins may be referred to as a fusion, or chimeric protein.

[0073] In some embodiments, a protein comprises a functional variant or functional fragment of a full-length wild type protein. A “functional fragment” or “functional portion”, as used herein, refers to any portion of a reference protein (e.g., a wild type protein) that encompasses less than the entire amino acid sequence of the reference protein while retaining one or more of the functions, e.g., catalytic or binding functions. For example, a functional fragment of a reverse transcriptase may encompass less than the entire amino acid sequence of a wild type reverse transcriptase, but retains the ability under at least one set of conditions to catalyze the polymerization of a polynucleotide. When the reference protein is a fusion of multiple functional domains, a functional fragment thereof may retain one or more of the functions of at least one of the functional domains. For example, a functional fragment of a Cas9 may encompass less than the entire amino acid sequence of a wild type Cas9, but retains its DNA binding ability and lacks its nuclease activity partially or completely.

[0074] A “functional variant” or “functional mutant”, as used herein, refers to any variant or mutant of a reference protein (e.g., a wild type protein) that encompasses one or more alterations to the amino acid sequence of the reference protein while retaining one or more of the functions, e.g., catalytic or binding functions. In some embodiments, the one or more alterations to the amino acid sequence comprises amino acid substitutions, insertions or deletions, or any combination thereof. In some embodiments, the one or more alterations to the amino acid sequence comprises amino acid substitutions. For example, a functional variant of a reverse transcriptase may comprise one or more amino acid substitutions compared to the amino acid sequence of a wild type reverse transcriptase, but retains the ability under at least one set of conditions to catalyze the polymerization of a polynucleotide. When the reference protein is a fusion of multiple functional domains, a functional variant thereof may retain one or more of the functions of at least one of the functional domains. For example, in some embodiments, a functional fragment of a Cas9 may comprise one or more amino acid substitutions in a nuclease domain, e.g., an H840A amino acid substitution, compared to the amino acid sequence of a wild type Cas9, but retains the DNA binding ability and lacks the nuclease activity partially or completely.

[0075] The term “function” and its grammatical equivalents as used herein may refer to a capability of operating, having, or serving an intended purpose. Functional may comprise any percent from baseline to 100% of an intended purpose. For example, functional may comprise or comprise about 5%, 10%, 15%, 20%, 25%, 30%, 35%, 40%, 45%, 50%, 55%, 60%, 65%, 70%, 75%, 80%, 85%, 90%, 95%, or up to about 100% of an intended purpose. In some embodiments, the term functional may mean over or over about 100% of normal function, for example, 125%, 150%, 175%, 200%, 250%, 300%, 400%, 500%, 600%, 700% or up to about 1000% of an intended purpose.

[0076] In some embodiments, a protein or polypeptides includes naturally occurring amino acids (e.g., one of the twenty amino acids commonly found in peptides synthesized in nature, and known by the one letter abbreviations A, R, N, C, D, Q, E, G, H, I, L, K, M, F, P, S, T, W, Y and V). In some embodiments, a protein or polypeptides includes non-naturally occurring amino acids (e.g., amino acids which is not one of the twenty amino acids commonly found in peptides synthesized in nature, including synthetic amino acids, amino acid analogs, and amino acid mimetics). In some embodiments, a protein or polypeptide includes both naturally occurring amino acids and non-naturally occurring amino acids. In some embodiments, a protein or polypeptide is modified.

[0077] In some embodiments, a protein or polypeptide is an isolated protein or an isolated polypeptide. The term “isolated” means free or substantially free from components which normally accompany it as found in the natural state or environment. For example, a polypeptide naturally present in a living animal is not isolated, when present in that living animal in its natural state, and the same polypeptide substantially or completely separated from the coexisting materials of its natural state is isolated.

[0078] In some embodiments, a protein is present within a cell, a tissue, an organ, or a virus particle. In some embodiments, a protein is present within a cell or a part of a cell (e.g., a bacteria cell, a plant cell, or an animal cell). In some embodiments, the cell is in a tissue, in a subject, or in a cell culture. In some embodiments, the cell is a microorganism (e.g., a bacterium, fungus, protozoan, or virus). In some embodiments, a protein is present in a mixture of analytes (e.g., a lysate). In some embodiments, the protein is present in a lysate from a plurality of cells or from a lysate of a single cell.

[0079] The terms “homologous,” “homology,” or “percent homology” as used herein refer to the degree of sequence identity between an amino acid or polynucleotide sequence and a corresponding reference sequence. “Homology” can refer to polymeric sequences, e.g., polypeptide or DNA sequences that are similar. Homology can mean, for example, nucleic acid sequences with at least about: 50%, 55%, 60%, 65%, 70%, 75%, 80%, 81%, 82%, 83%, 84%, 85%, 86%, 87%, 88%, 89%, 90%, 91%, 92%, 93%, 94%, 95%, 96%, 97%, 98%, 99%, or 100% identity. In other embodiments, a “homologous sequence” of nucleic acid sequences may exhibit 93%, 95% or 98% sequence identity to the reference nucleic acid sequence. For example, a “region of homology to a genomic region” can be a region of DNA that has a similar sequence to a given genomic region in the genome. A region of homology can be of any length that is sufficient to promote binding of a spacer, primer binding site or protospacer sequence to the genomic region. For example, the region of homology can comprise at least 5, 10, 11, 12, 13, 14, 15, 16, 17, 18, 19, 20, 21, 22, 23, 24, 25, 30, 35, 40, 45, 50, 55, 60, 65, 70, 75, 80, 85, 90, 95, 100, 200, 300, 400, 500, 600, 700, 800, 900, 1000, 1100, 1200, 1300, 1400, 1500, 1600, 1700, 1800, 1900, 2000, 2100, 2200, 2300, 2400, 2500, 2600, 2700, 2800, 2900, 3000, 3100 or more bases in length such that the region of homology has sufficient homology to undergo binding with the corresponding genomic region.

[0080] When a percentage of sequence homology or identity is specified, in the context of two nucleic acid sequences or two polypeptide sequences, the percentage of homology or identity generally refers to the alignment of two or more sequences across a portion of their length when compared and aligned for maximum correspondence. When a position in the compared sequence can be occupied by the same base or amino acid, then the molecules can be homologous at that position. Unless stated otherwise, sequence homology or identity is assessed over the specified length of the nucleic acid, polypeptide or portion thereof. In some embodiments, the homology or identity is assessed over a functional portion or specified portion of the length.

[0081] Alignment of sequences for assessment of sequence homology can be conducted by algorithms known in the art, such as the Basic Local Alignment Search Tool (BLAST) algorithm, which is described in Altschul et al, J. Mol. Biol. 215:403-410, 1990. A publicly available, internet interface, for performing BLAST analyses is accessible through the National Center for Biotechnology Information. Additional known algorithms include those published in: Smith & Waterman, “Comparison of Biosequences”, Adv. Appl. Math. 2:482, 1981; Needleman & Wunsch, “A general method applicable to the search for similarities in the amino acid sequence of two proteins” J. Mol. Biol. 48:443, 1970; Pearson & Lipman “Improved tools for biological sequence comparison”, Proc. Natl. Acad. Sci. USA 85:2444, 1988; or by automated implementation of these or similar algorithms. Global alignment programs may also be used to align similar sequences of roughly equal size. Examples of global alignment programs include NEEDLE (available at www.ebi.ac.uk/Tools/psa/emboss_needle/) which is part of the EMBOSS package (Rice P et al., Trends Genet., 2000; 16:276-277), and the GGSEARCH program https://fasta.bioch.virginia.edu/fasta_www2/, which is part of the FASTA package (Pearson W and Lipman D, 1988, Proc. Natl. Acad. Sci. USA, 85:2444-2448). Both of these programs are based on the Needleman-Wunsch algorithm which is used to find the optimum alignment (including gaps) of two sequences along their entire length. A detailed discussion of sequence analysis can also be found in Unit 19.3 of Ausubel et al (“Current Protocols in Molecular Biology” John Wiley & Sons Inc, 1994-1998, Chapter 15, 1998).

[0082] Amino acid (or nucleotide) positions may be determined in homologous sequences based on alignment, for example, “H840” in a reference Cas9 sequence may correspond to H839, or another position in a Cas9 homolog.

[0083] The term “polynucleotide” or “nucleic acid molecule” can be any polymeric form of nucleotides, including DNA, RNA, a hybridization thereof, or RNA-DNA chimeric molecules. In some embodiments, a polynucleotide comprises cDNA, genomic DNA, mRNA, tRNA, rRNA, or microRNA. In some embodiments, a polynucleotide is double stranded, e.g., a double-stranded DNA in a gene. In some embodiments, a polynucleotide is single-stranded or substantially single-stranded, e.g., single-stranded DNA or an mRNA. In some embodiments, a polynucleotide is a cell-free nucleic acid molecule. In some embodiments, a polynucleotide circulates in blood. In some embodiments, a polynucleotide is a cellular nucleic acid molecule. In some embodiments, a polynucleotide is a cellular nucleic acid molecule in a cell circulating in blood.

[0084] Polynucleotides can have any three-dimensional structure. The following are nonlimiting examples of polynucleotides: a gene or gene fragment (for example, a probe, primer, EST or SAGE tag), an exon, an intron, intergenic DNA (including, without limitation, heterochromatic DNA), messenger RNA (mRNA), transfer RNA (tRNA), ribosomal RNA (rRNA), a ribozyme, cDNA, a recombinant polynucleotide, a branched polynucleotide, a plasmid, a vector, isolated DNA, isolated RNA, sgRNA, guide RNA, a nucleic acid probe, a primer, an snRNA, a long non-coding RNA, a snoRNA, a siRNA, a miRNA, a tRNA-derived small RNA (tsRNA), an antisense RNA, an shRNA, or a small rDNA-derived RNA (srRNA).

[0085] In some embodiments, a polynucleotide comprises deoxyribonucleotides, ribonucleotides or analogs thereof. In some embodiments, a polynucleotide comprises modified nucleotides, such as methylated nucleotides and nucleotide analogs. If present, modifications to the nucleotide structure can be imparted before or after assembly of the polynucleotide. The sequence of nucleotides can be interrupted by non-nucleotide components. A polynucleotide can be further modified after polymerization, such as by conjugation with a labeling component.

[0086] In some embodiments, a polynucleotide is composed of a specific sequence of four nucleotide bases: adenine (A); cytosine (C); guanine (G); thymine (T); and uracil (U) for thymine when the polynucleotide is RNA. In some embodiments, the polynucleotide may comprise one or more other nucleotide bases, such as inosine (I), which is read by the translation machinery as guanine (G).

[0087] In some embodiments, a polynucleotide may be modified. As used herein, the terms “modified” or “modification” refers to chemical modification with respect to the A, C, G, T and U nucleotides. In some embodiments, modifications may be on the nucleoside base and/or sugar portion of the nucleosides that comprise the polynucleotide. In some embodiments, the modification may be on the internucleoside linkage (e.g., phosphate backbone). In some embodiments, multiple modifications are included in the modified nucleic acid molecule. In some embodiments, a single modification is included in the modified nucleic acid molecule.

[0088] The term “complement”, “complementary”, or “complementarity” as used herein, refers to the ability of two polynucleotide molecules to base pair with each other. Complementary polynucleotides may base pair via hydrogen bonding, which may be Watson Crick, Hoogsteen or reversed Hoogsteen hydrogen bonding. For example, an adenine on one polynucleotide molecule will base pair to a guanine on a second polynucleotide molecule and a cytosine on one polynucleotide molecule will base pair to a thymine or uracil on a second polynucleotide molecule. Two polynucleotide molecules are complementary to each other when a first polynucleotide molecule comprising a first nucleotide sequence can base pair with a second polynucleotide molecule comprising a second nucleotide sequence. For instance, the two DNA molecules 5′-ATGC-3′ and 5′-GCAT-3′ are complementary, and the complement of the DNA molecule 5′-ATGC-3′ is 5′-GCAT-3′. A percentage of complementarity indicates the percentage of nucleotides in a polynucleotide molecule which can base pair with a second polynucleotide molecule (e.g., 5, 6, 7, 8, 9, 10 out of 10 being 50%, 60%, 70%, 80%, 90%, and 100% complementary, respectively). “Perfectly complementary” means that all the contiguous nucleotides of a polynucleotide molecule will base pair with the same number of contiguous nucleotides in a second polynucleotide molecule. “Substantially complementary” as used herein refers to a degree of complementarity that can be 70%, 75%, 80%, 85%, 90%, 95%, 97%, 98%, or 99% over all or a portion of two polynucleotide molecules. In some embodiments, the portion of complementarity may be a region of 10, 15, 20, 25, 30, 35, 40, 45, 50, or more nucleotides. “Substantial complementary” can also refer to a 100% complementarity over a portion of two polynucleotide molecules. In some embodiments, the portion of complementarity between the two polynucleotide molecules is at least 60%, 65%, 70%, 75%, 80%, 85%, 90%, 95%, 97%, 98%, or 99% of the length of at least one of the two polynucleotide molecules or a functional or defined portion thereof.

[0089] As used herein, “expression” refers to the process by which polynucleotides are transcribed into mRNA and/or the process by which polynucleotides, e.g., the transcribed mRNA, translated into peptides, polypeptides, or proteins. If the polynucleotide is derived from genomic DNA, expression may include splicing of the mRNA in a eukaryotic cell. In some embodiments, expression of a polynucleotide, e.g., a gene or a DNA encoding a protein, is determined by the amount of the protein encoded by the gene after transcription and translation of the gene. In some embodiments, expression of a polynucleotide, e.g., a gene or a DNA encoding a protein, is determined by the amount of a functional form of the protein encoded by the gene after transcription and translation of the gene. In some embodiments, expression of a gene is determined by the amount of the mRNA, or transcript, that is encoded by the gene after transcription the gene. In some embodiments, expression of a polynucleotide, e.g., an mRNA, is determined by the amount of the protein encoded by the mRNA after translation of the mRNA. In some embodiments, expression of a polynucleotide, e.g., a mRNA or coding RNA, is determined by the amount of a functional form of the protein encoded by the polypeptide after translation of the polynucleotide.

[0090] The term “sequencing” as used herein, may comprise capillary sequencing, bisulfite-free sequencing, bisulfite sequencing, TET-assisted bisulfite (TAB) sequencing, ACE-sequencing, high-throughput sequencing, Maxam-Gilbert sequencing, massively parallel signature sequencing, Polony sequencing, 454 pyrosequencing, Sanger sequencing, Illumina sequencing, SOLID sequencing, Ion Torrent semiconductor sequencing, DNA nanoball sequencing, Heliscope single molecule sequencing, single molecule real time (SMRT) sequencing, nanopore sequencing, shot gun sequencing, RNA sequencing, or any combination thereof.

[0091] The terms “equivalent” or “biological equivalent” are used interchangeably when referring to a particular molecule, or biological or cellular material, and means a molecule having minimal homology to another molecule while still maintaining a desired structure or functionality.

[0092] The term “encode” as it is applied to polynucleotides refers to a polynucleotide which is said to “encode” another polynucleotide, a polypeptide, or an amino acid if, in its native state or when manipulated by methods well known to those skilled in the art, it can be used as polynucleotide synthesis template, e.g., transcribed into an RNA, reverse transcribed into a DNA or cDNA, and/or translated to produce an amino acid, or a polypeptide or fragment thereof. In some embodiments, a polynucleotide comprising three contiguous nucleotides form a codon that encodes a specific amino acid. In some embodiments, a polynucleotide comprises one or more codons that encode a polypeptide. In some embodiments, a polynucleotide comprising one or more codons comprises a mutation in a codon compared to a wild-type reference polynucleotide. In some embodiments, the mutation in the codon encodes an amino acid substitution in a polypeptide encoded by the polynucleotide as compared to a wild-type reference polypeptide.

[0093] The term “mutation” as used herein refers to a change and/or alteration in an amino acid sequence of a protein or nucleic acid sequence of a polynucleotide. Such changes and/or alterations may comprise the substitution, insertion, deletion and/or truncation of one or more amino acids, in the case of an amino acid sequence, and/or nucleotides, in the case of nucleic acid sequence, compared to a reference amino acid or nucleic acid sequence. In some embodiments, the reference sequence is a wild-type sequence. In some embodiments, a mutation in a nucleic acid sequence of a polynucleotide encodes a mutation in the amino acid sequence of a polypeptide. In some embodiments, the mutation in the amino acid sequence of the polypeptide or the mutation in the nucleic acid sequence of the polynucleotide is a mutation associated with a disease state.

[0094] The term “subject” and its grammatical equivalents as used herein may refer to a human or a non-human. A subject may be a mammal. A human subject may be male or female. A human subject may be of any age. A subject may be a human embryo. A human subject may be a newborn, an infant, a child, an adolescent, or an adult. A human subject may be up to about 100 years of age. A human subject may be in need of treatment for a genetic disease or disorder.

[0095] The terms “treatment” or “treating” and their grammatical equivalents may refer to the medical management of a subject with an intent to cure, ameliorate, or ameliorate a symptom of, a disease, condition, or disorder. Treatment may include active treatment, that is, treatment directed specifically toward the improvement of a disease, condition, or disorder. Treatment may include causal treatment, that is, treatment directed toward removal of the cause of the associated disease, condition, or disorder. In addition, this treatment may include palliative treatment, that is, treatment designed for the relief of symptoms rather than the curing of the disease, condition, or disorder. Treatment may include supportive treatment, that is, treatment employed to supplement another specific therapy directed toward the improvement of the disease, condition, or disorder. In some embodiments, a condition may be pathological. In some embodiments, a treatment may not completely cure or prevent a disease, condition, or disorder. In some embodiments, a treatment ameliorates, but does not completely cure or prevent a disease, condition, or disorder. In some embodiments, a subject may be treated for 12 hours, 24 hours, 2 days, 3 days, 4 days, 5 days, 6 days, 7 days, 2 weeks, 3 weeks, 4 weeks, 2 months, 3 months, 4 months, 5 months, 6 months, 1 year, 2 years, 3 years, 4 years, 5 years, 6 years, indefinitely, or life of the subject.

[0096] The term “ameliorate” and its grammatical equivalents means to decrease, suppress, attenuate, diminish, arrest, or stabilize the development or progression of a disease.

[0097] The terms “prevent” or “preventing” means delaying, forestalling, or avoiding the onset or development of a disease, condition, or disorder for a period of time. Prevent also means reducing risk of developing a disease, disorder, or condition. Prevention includes minimizing or partially or completely inhibiting the development of a disease, condition, or disorder. In some embodiments, a composition, e.g., a pharmaceutical composition, prevents a disorder by delaying the onset of the disorder for 12 hours, 24 hours, 2 days, 3 days, 4 days, 5 days, 6 days, 7 days, 2 weeks, 3 weeks, 4 weeks, 2 months, 3 months, 4 months, 5 months, 6 months, 1 year, 2 years, 3 years, 4 years, 5 years, 6 years, indefinitely, or life of a subject.

[0098] The term “effective amount” or “therapeutically effective amount” may refer to a quantity of a composition, for example a composition comprising a construct, that can be sufficient to result in a desired activity upon introduction into a subject as disclosed herein.

[0099] An effective amount of the prime editing compositions can be provided to the target gene or cell, whether the cell is ex vivo or in vivo.

[0100] An effective amount can be the amount to induce, for example, at least about a 2-fold change (increase or decrease) or more in the amount of target nucleic acid modulation (e.g., expression of SLC37A4 gene to produce functional SLC37A4 G6PT1 protein) observed relative to a negative control. An effective amount or dose can induce, for example, about 2-fold increase, about 3-fold increase, about 4-fold increase, about 5-fold increase, about 6-fold increase, about 7-fold increase, about 8-fold increase, about 9-fold increase, about 10-fold increase, about 25-fold increase, about 50-fold increase, about 100-fold increase, about 200-fold increase, about 500-fold increase, about 700-fold increase, about 1000-fold increase, about 5000-fold increase, or about 10,000-fold increase in target gene modulation (e.g., expression of a target SLC37A4 gene to produce functional G6PT1).

[0101] The amount of target gene modulation may be measured by any suitable method known in the art. In some embodiments, the “effective amount” or “therapeutically effective amount” is the amount of a composition that is required to ameliorate the symptoms of a disease relative to an untreated patient. In some embodiments, an effective amount is the amount of a composition sufficient to introduce an alteration in a gene of interest in a cell (e.g., a cell in vitro or in vivo).

[0102] An effective amount can be the amount to induce, when administered to a population of cells, a certain percentage of the population of cells to have a correction of the G339C mutation or L348fs mutation. For example, in some embodiments, an effective amount can be the amount to induce, when administered to or introduced to a population of cells, installation of one or more intended nucleotide edits that correct a c. 1015 G->T (encoding G339C amino acid substitution) mutation in the SLC37A4 gene, in at least about 1%, 2%, 5%, about 10%, about 15%, about 20%, about 25%, about 30%, about 35%, about 40%, about 45%, about 50%, about 55%, about 60%, about 65%, about 70%, about 75%, about 80%, about 85%, about 90%, about 95%, or about 99% of the population of cells. For example, in some embodiments, an effective amount can be the amount to induce, when administered to or introduced to a population of cells, installation of one or more intended nucleotide edits that correct a c. 1042delCT (L348fs) mutation in the SLC37A4 gene, in at least about 1%, 2%, 5%, about 10%, about 15%, about 20%, about 25%, about 30%, about 35%, about 40%, about 45%, about 50%, about 55%, about 60%, about 65%, about 70%, about 75%, about 80%, about 85%, about 90%, about 95%, or about 99% of the population of cells.

### Prime Editing

[0103] The term “prime editing” refers to programmable editing of a target DNA using a prime editor complexed with a PEgRNA to incorporate an intended nucleotide edit (also referred to herein as a nucleotide change) into the target DNA through target-primed DNA synthesis. A target polynucleotide, e.g., a target gene of prime editing may comprise a double stranded DNA molecule having two complementary strands: a first strand that may be referred to as a “target strand” or a “non-edit strand”, and a second strand that may be referred to as a “non-target strand,” or an “edit strand.” In some embodiments, in a prime editing guide RNA (PEgRNA), a spacer sequence is complementary or substantially complementary to a specific sequence on the target strand, which may be referred to as a “search target sequence”. In some embodiments, the spacer sequence anneals with the target strand at the search target sequence. The target strand may also be referred to as the “non-Protospacer Adjacent Motif (non-PAM strand).” In some embodiments, the non-target strand may also be referred to as the “PAM strand”. In some embodiments, the PAM strand comprises a protospacer sequence and optionally a protospacer adjacent motif (PAM) sequence. In prime editing using a Cas-protein-based prime editor, a PAM sequence refers to a short DNA sequence immediately adjacent to the protospacer sequence on the PAM strand of the target gene. A PAM sequence may be specifically recognized by a programmable DNA binding protein, e.g., a Cas nickase or a Cas nuclease In some embodiments, a specific PAM is characteristic of a specific programmable DNA binding protein, e.g., a Cas nickase or a Cas nuclease A protospacer sequence refers to a specific sequence in the PAM strand of the target gene that is complementary to the search target sequence. In a PEgRNA, a spacer sequence may have a substantially identical sequence as the protospacer sequence on the edit strand of a target gene, except that the spacer sequence may comprise Uracil (U) and the protospacer sequence may comprise Thymine (T).

[0104] In some embodiments, the double stranded target DNA comprises a nick site on the PAM strand (or non-target strand). As used herein, a “nick site” refers to a specific position in between two nucleotides or two base pairs of the double stranded target DNA. In some embodiments, the position of a nick site is determined relative to the position of a specific PAM sequence. In some embodiments, the nick site is the particular position where a nick will occur when the double stranded target DNA is contacted with a nickase, for example, a Cas nickase, that recognizes a specific PAM sequence. In some embodiments, the nick site is upstream of a specific PAM sequence on the PAM strand of the double stranded target DNA. In some embodiments, the nick site is downstream of a specific PAM sequence on the PAM strand of the double stranded target DNA. In some embodiments, the nick site is 3 base pairs upstream of the PAM sequence, and the PAM sequence is recognized by a Streptococcus pyogenes Cas9 nickase, a P. lavamentivorans Cas9 nickase, a C. diphtheriae Cas9 nickase, a N. cinerea Cas9, a S. aureus Cas9, or a N. lari Cas9 nickase. In some embodiments, the nick site is 3 base pairs upstream of the PAM sequence, and the PAM sequence is recognized by a Cas9 nickase, wherein the Cas9 nickase comprises a nuclease active HNH domain and a nuclease inactive RuvC domain. In some embodiments, the nick site is 2 base pairs upstream of the PAM sequence, and the PAM sequence is recognized by a S. thermophilus Cas9 nickase.

[0105] A “primer binding site” (PBS or primer binding site sequence) is a single-stranded portion of the PEgRNA that comprises a region of complementarity to the PAM strand (i.e. the non-target strand or the edit strand). The PBS is complementary or substantially complementary to a sequence on the PAM strand of the double stranded target DNA that is immediately upstream of the nick site. In some embodiments, in the process of prime editing, the PEgRNA complexes with and directs a prime editor to bind the search target sequence on the target strand of the double stranded target DNA, and generates a nick at the nick site on the non-target strand of the double stranded target DNA. In some embodiments, the PBS is complementary to or substantially complementary to, and can anneal to, a free 3′ end on the non-target strand of the double stranded target DNA at the nick site. In some embodiments, the PBS annealed to the free 3′ end on the non-target strand can initiate target-primed DNA synthesis.

[0106] An “editing template” of a PEgRNA is a single-stranded portion of the PEgRNA that is 5′ of the PBS and comprises a region of complementarity to the PAM strand (i.e. the non-target strand or the edit strand), and comprises one or more intended nucleotide edits compared to the endogenous sequence of the double stranded target DNA. In some embodiments, the editing template and the PBS are immediately adjacent to each other. Accordingly, in some embodiments, a PEgRNA in prime editing comprises a single-stranded portion that comprises the PBS and the editing template immediately adjacent to each other.

[0107] In some embodiments, the single stranded portion of the PEgRNA comprising both the PBS and the editing template is complementary or substantially complementary to an endogenous sequence on the PAM strand (i.e. the non-target strand or the edit strand) of the double stranded target DNA except for one or more non-complementary nucleotides at the intended nucleotide edit positions. As used herein, regardless of relative 5′-3′ positioning in other context, the relative positions as between the PBS and the editing template, and the relative positions as among elements of a PEgRNA, are determined by the 5′ to 3′ order of the PEgRNA as a single molecule regardless of the position of sequences in the double stranded target DNA that may have complementarity or identity to elements of the PEgRNA. In some embodiments, the editing template is complementary or substantially complementary to a sequence on the PAM strand that is immediately downstream of the nick site, except for one or more non-complementary nucleotides at the intended nucleotide edit positions. The endogenous, e.g., genomic, sequence that is complementary or substantially complementary to the editing template, except for the one or more non-complementary nucleotides at the position corresponding to the intended nucleotide edit, may be referred to as an “editing target sequence”. In some embodiments, the editing template has identity or substantial identity to a sequence on the target strand that is complementary to, or having the same position in the genome as, the editing target sequence, except for one or more insertions, deletions, or substitutions at the intended nucleotide edit positions. In some embodiments, the editing template encodes a single stranded DNA, wherein the single stranded DNA has identity or substantial identity to the editing target sequence except for one or more insertions, deletions, or substitutions at the positions of the one or more intended nucleotide edits. In some embodiments, the editing template is about 3 to 40 nucleotides in length. In some embodiments, the editing template is about 10 to 30 nucleotides in length. For example, the editing template may be at least 3, at least 4, at least 5, at least 6, at least 7, at least 8, at least 9, at least 10, at least 11, at least 12, at least 13, at least 14, at least 15, at least 16, at least 17, at least 18, at least 19, at least 20, at least 21, at least 22, at least 23, at least 24, at least 25, at least 26, at least 27, at least 28, at least 29, at least 30, at least 31, at least 32, at least 33, at least 34, at least 35, at least 36, at least 37, at least 38, at least 39, at least 40, at least 41, at least 42, at least 43, at least 44, at least 45, at least 46, at least 47, at least 48, at least 49, or at least 50 nucleotides in length. In some embodiments, the editing template is no more than 5, 6, 7, 8, 9, 10, 11, 12, 13, 14, 15, 16, 17, 18, 19, 20, 21, 22, 23, 24, 25, 26, 27, 28, 29, 30, 31, 32, 33, 34, 35, 36, 37, 38, 39, 40, 41, 42, 43, 44, 45, 46, 47, 48, 49, 50, 51, 52, 53, 54, 55, 56, 57, 58, 59, 60, 61, 62, 63, 64, 65, 66, 67, 68, 69, 70, 71, 72, 73, 74, or 75 nucleotides in length.

[0108] In some embodiments, a PEgRNA complexes with and directs a prime editor to bind to the search target sequence of the target gene. In some embodiments, the bound prime editor generates a nick on the edit strand (PAM strand) of the target gene at the nick site. In some embodiments, a primer binding site (PBS) of the PEgRNA anneals with a free 3′ end formed at the nick site, and the prime editor initiates DNA synthesis from the nick site, using the free 3′ end as a primer. Subsequently, a single-stranded DNA encoded by the editing template of the PEgRNA is synthesized. In some embodiments, the newly synthesized single-stranded DNA comprises one or more intended nucleotide edits compared to the endogenous target gene sequence. In some embodiments, the editing template of a PEgRNA is complementary to a sequence in the edit strand except for one or more mismatches at the intended nucleotide edit positions in the editing template partially complementary to the editing template may be referred to as an “editing target sequence”. Accordingly, in some embodiments, the newly synthesized single stranded DNA has identity or substantial identity to a sequence in the editing target sequence, except for one or more insertions, deletions, or substitutions at the intended nucleotide edit positions.

[0109] In some embodiments, the newly synthesized single-stranded DNA equilibrates with the editing target on the edit strand of the target gene for pairing with the target strand of the target gene. In some embodiments, the editing target sequence of the target gene is excised by a flap endonuclease (FEN), for example, FEN1. In some embodiments, the FEN is an endogenous FEN, for example, in a cell comprising the target gene. In some embodiments, the FEN is provided as part of the prime editor, either linked to other components of the prime editor or provided in trans. In some embodiments, the newly synthesized single stranded DNA, which comprises the intended nucleotide edit, replaces the endogenous single stranded editing target sequence on the edit strand of the target gene. In some embodiments, the newly synthesized single stranded DNA and the endogenous DNA on the target strand form a heteroduplex DNA structure at the region corresponding to the editing target sequence of the target gene. In some embodiments, the newly synthesized single-stranded DNA comprising the nucleotide edit is paired in the heteroduplex with the target strand of the target DNA that does not comprise the nucleotide edit, thereby creating a mismatch between the two otherwise complementary strands. In some embodiments, the mismatch is recognized by DNA repair machinery, e.g., an endogenous DNA repair machinery. In some embodiments, through DNA repair, the intended nucleotide edit is incorporated into the target gene.

### Prime Editor

[0110] The term “prime editor (PE)” refers to the polypeptide or polypeptide components involved in prime editing, or any polynucleotide(s) encoding the polypeptide or polypeptide components. In various embodiments, a prime editor includes a polypeptide domain having DNA binding activity and a polypeptide domain having DNA polymerase activity. In some embodiments, the prime editor further comprises a polypeptide domain having nuclease activity. In some embodiments, the polypeptide domain having DNA binding activity comprises a nuclease domain or nuclease activity. In some embodiments, the polypeptide domain having nuclease activity comprises a nickase, or a fully active nuclease. As used herein, the term “nickase” refers to a nuclease capable of cleaving only one strand of a double-stranded DNA target. In some embodiments, the prime editor comprises a polypeptide domain that is an inactive nuclease. In some embodiments, the polypeptide domain having programmable DNA binding activity comprises a nucleic acid guided DNA binding domain, for example, a CRISPR-Cas protein, for example, a Cas9 nickase, a Cpf1 nickase, or another CRISPR-Cas nuclease. In some embodiments, the polypeptide domain having DNA polymerase activity comprises a template-dependent DNA polymerase, for example, a DNA-dependent DNA polymerase or an RNA-dependent DNA polymerase. In some embodiments, the DNA polymerase is a reverse transcriptase. In some embodiments, the prime editor comprises additional polypeptides involved in prime editing, for example, a polypeptide domain having 5′ endonuclease activity, e.g., a 5′ endogenous DNA flap endonucleases (e.g., FEN1), for helping to drive the prime editing process towards the edited product formation. In some embodiments, the prime editor further comprises an RNA-protein recruitment polypeptide, for example, a MS2 coat protein.

[0111] A prime editor may be engineered. In some embodiments, the polypeptide components of a prime editor do not naturally occur in the same organism or cellular environment. In some embodiments, the polypeptide components of a prime editor may be of different origins or from different organisms. In some embodiments, a prime editor comprises a DNA binding domain and a DNA polymerase domain that are derived from different species. In some embodiments, a prime editor comprises a Cas polypeptide and a reverse transcriptase polypeptide that are derived from different species. For example, a prime editor may comprise a S. pyogenes Cas9 polypeptide and a Moloney murine leukemia virus (M-MLV) reverse transcriptase polypeptide.

[0112] In some embodiments, polypeptide domains of a prime editor may be fused or linked by a peptide linker to form a fusion protein. In other embodiments, a prime editor comprises one or more polypeptide domains provided in trans as separate proteins, which are capable of being associated to each other through non-peptide linkages or through aptamers or recruitment sequences. For example, a prime editor may comprise a DNA binding domain and a reverse transcriptase domain associated with each other by an RNA-protein recruitment aptamer, e.g., a MS2 aptamer, which may be linked to a PEgRNA. Prime editor polypeptide components may be encoded by one or more polynucleotides in whole or in part. In some embodiments, a single polynucleotide, construct, or vector encodes the prime editor fusion protein. In some embodiments, multiple polynucleotides, constructs, or vectors each encode a polypeptide domain or portion of a domain of a prime editor, or a portion of a prime editor fusion protein. For example, a prime editor fusion protein may comprise an N-terminal portion fused to an intein-N and a C-terminal portion fused to an intein-C, each of which is individually encoded by an AAV vector.

### Prime Editor Nucleotide Polymerase Domain

[0113] In some embodiments, a prime editor comprises a nucleotide polymerase domain, e.g., a DNA polymerase domain. The DNA polymerase domain may be a wild-type DNA polymerase domain, a full-length DNA polymerase protein domain, or may be a functional mutant, a functional variant, or a functional fragment thereof. In some embodiments, the polymerase domain is a template dependent polymerase domain. For example, the DNA polymerase may rely on a template polynucleotide strand, e.g., the editing template sequence, for new strand DNA synthesis. In some embodiments, the prime editor comprises a DNA-dependent DNA polymerase. For example, a prime editor having a DNA-dependent DNA polymerase can synthesize a new single stranded DNA using a PEgRNA editing template that comprises a DNA sequence as a template. In such cases, the PEgRNA is a chimeric or hybrid PEgRNA, and comprising an extension arm comprising a DNA strand. The chimeric or hybrid PEgRNA may comprise an RNA portion (including the spacer and the gRNA core) and a DNA portion (the extension arm comprising the editing template that includes a strand of DNA).

[0114] The DNA polymerases can be wild type polymerases from eukaryotic, prokaryotic, archael, or viral organisms, and/or the polymerases may be modified by genetic engineering, mutagenesis, or directed evolution-based processes. The polymerases can be a T7 DNA polymerase, T5 DNA polymerase, T4 DNA polymerase, Klenow fragment DNA polymerase, DNA polymerase III and the like. The polymerases can be thermostable, and can include Taq, Tne, Tma, Pfu, Tfl, Tth, Stoffel fragment, VENT® and DEEPVENT® DNA polymerases, KOD, Tgo, JDF3, and mutants, variants and derivatives thereof.

[0115] In some embodiments, the DNA polymerase is a bacteriophage polymerase, for example, a T4, T7, or phi29 DNA polymerase. In some embodiments, the DNA polymerase is an archaeal polymerase, for example, pol I type archaeal polymerase or a pol II type archaeal polymerase. In some embodiments, the DNA polymerase comprises a thermostable archaeal DNA polymerase. In some embodiments, the DNA polymerase comprises a eubacterial DNA polymerase, for example, Pol I, Pol II, or Pol III polymerase. In some embodiments, the DNA polymerase is a Pol I family DNA polymerase. In some embodiments, the DNA polymerase is a E. coli Pol I DNA polymerase. In some embodiments, the DNA polymerase is a Pol II family DNA polymerase. In some embodiments, the DNA polymerase is a Pyrococcus furiosus (Pfu) Pol II DNA polymerase. In some embodiments, the DNA Polymerase is a Pol IV family DNA polymerase. In some embodiments, the DNA polymerase is a E. coli Pol IV DNA polymerase.

[0116] In some embodiments, the DNA polymerase comprises a eukaryotic DNA polymerase. In some embodiments, the DNA polymerase is a Pol-beta DNA polymerase, a Pol-lambda DNA polymerase, a Pol-sigma DNA polymerase, or a Pol-mu DNA polymerase. In some embodiments, the DNA polymerase is a Pol-alpha DNA polymerase. In some embodiments, the DNA polymerase is a POLA1 DNA polymerase. In some embodiments, the DNA polymerase is a POLA2 DNA polymerase. In some embodiments, the DNA polymerase is a Pol-delta DNA polymerase. In some embodiments, the DNA polymerase is a POLD1 DNA polymerase. In some embodiments, the DNA polymerase is a POLD2 DNA polymerase. In some embodiments, the DNA polymerase is a human POLD1 DNA polymerase. In some embodiments, the DNA polymerase is a human POLD2 DNA polymerase. In some embodiments, the DNA polymerase is a POLD3 DNA polymerase. In some embodiments, the DNA polymerase is a POLD4 DNA polymerase. In some embodiments, the DNA polymerase is a Pol-epsilon DNA polymerase. In some embodiments, the DNA polymerase is a POLE1 DNA polymerase. In some embodiments, the DNA polymerase is a POLE2 DNA polymerase. In some embodiments, the DNA polymerase is a POLE3 DNA polymerase. In some embodiments, the DNA polymerase is a Pol-eta (POLH) DNA polymerase. In some embodiments, the DNA polymerase is a Pol-iota (POLI) DNA polymerase. In some embodiments, the DNA polymerase is a Pol-kappa (POLK) DNA polymerase. In some embodiments, the DNA polymerase is a Rev1 DNA polymerase. In some embodiments, the DNA polymerase is a human Rev1 DNA polymerase. In some embodiments, the DNA polymerase is a viral DNA-dependent DNA polymerase. In some embodiments, the DNA polymerase is a B family DNA polymerases. In some embodiments, the DNA polymerase is a herpes simplex virus (HSV) UL30 DNA polymerase. In some embodiments, the DNA polymerase is a cytomegalovirus (CMV) UL54 DNA polymerase.

[0117] In some embodiments, the DNA polymerase is an archaeal polymerase. In some embodiments, the DNA polymerase is a Family B/pol I type DNA polymerase. For example, in some embodiments, the DNA polymerase is a homolog of Pfu from Pyrococcus furiosus. In some embodiments, the DNA polymerase is a pol II type DNA polymerase. For example, in some embodiments, the DNA polymerase is a homolog of P. furiosus DP1/DP2 2-subunit polymerase. In some embodiments, the DNA polymerase lacks 5′ to 3′ nuclease activity. Suitable DNA polymerases (pol I or pol II) can be derived from archaea with optimal growth temperatures that are similar to the desired assay temperatures.

[0118] In some embodiments, the DNA polymerase comprises a thermostable archaeal DNA polymerase. In some embodiments, the thermostable DNA polymerase is isolated or derived from Pyrococcus species (furiosus, species GB-D, woesii, abysii, horikoshii), Thermococcus species (kodakaraensis KOD1, litoralis, species 9 degrees North-7, species JDF-3, gorgonarius), Pyrodictium occultum, and Archaeoglobus fulgidus.

[0119] Polymerases may also be from eubacterial species. In some embodiments, the DNA polymerase is a Pol I family DNA polymerase. In some embodiments, the DNA polymerase is an E. coli Pol I DNA polymerase. In some embodiments, the DNA polymerase is a Pol II family DNA polymerase. In some embodiments, the DNA polymerase is a Pyrococcus furiosus (Pfu) Pol II DNA polymerase. In some embodiments, the DNA Polymerase is a Pol III family DNA polymerase. In some embodiments, the DNA Polymerase is a Pol IV family DNA polymerase. In some embodiments, the DNA polymerase is an E. coli Pol IV DNA polymerase. In some embodiments, the Pol I DNA polymerase is a DNA polymerase functional variant that lacks or has reduced 5′ to 3′ exonuclease activity.

[0120] Suitable thermostable pol I DNA polymerases can be isolated from a variety of thermophilic eubacteria, including Thermus species and Thermotoga maritima such as Thermus aquaticus (Taq), Thermus thermophilus (Tth) and Thermotoga maritima (Tma UITma).

[0121] In some embodiments, a prime editor comprises an RNA-dependent DNA polymerase domain, for example, a reverse transcriptase (RT). A RT or an RT domain may be a wild type RT domain, a full-length RT domain, or may be a functional mutant, a functional variant, or a functional fragment thereof. An RT or an RT domain of a prime editor may comprise a wild-type RT, or may be engineered or evolved to contain specific amino acid substitutions, truncations, or variants. An engineered RT may comprise sequences or amino acid changes different from a naturally occurring RT. In some embodiments, the engineered RT may have improved reverse transcription activity over a naturally occurring RT or RT domain. In some embodiments, the engineered RT may have improved features over a naturally occurring RT, for example, improved thermostability, reverse transcription efficiency, or target fidelity. In some embodiments, a prime editor comprising the engineered RT has improved prime editing efficiency over a prime editor having a reference naturally occurring RT.

[0122] In some embodiments, a prime editor comprises a virus RT, for example, a retrovirus RT. Non-limiting examples of virus RT include Moloney murine leukemia virus (M-MLV or MLVRT); human T-cell leukemia virus type 1 (HTLV-1) RT; bovine leukemia virus (BLV) RT; Rous Sarcoma Virus (RSV) RT; human immunodeficiency virus (HIV) RT, M-MFV RT, Avian Sarcoma-Leukosis Virus (ASLV) RT, Rous Sarcoma Virus (RSV) RT, Avian Myeloblastosis Virus (AMV) RT, Avian Erythroblastosis Virus (AEV) Helper Virus MCAV RT, Avian Myelocytomatosis Virus MC29 Helper Virus MCAV RT, Avian Reticuloendotheliosis Virus (REV-T) Helper Virus REV-A RT, Avian Sarcoma Virus UR2 Helper Virus (UR2AV) RT, Avian Sarcoma Virus Y73 Helper Virus YAV RT, Rous Associated Virus (RAV) RT, and Myeloblastosis Associated Virus (MAV) RT, all of which may be suitably used in the methods and composition described herein.

[0123] In some embodiments, the prime editor comprises a wild type M-MLV RT. An exemplary sequence of a wild type M-MLV RT is provided in SEQ ID NO: 50. In some embodiments, the prime editor comprises a M-MLV RT comprising a H8Y amino acid substitution. Collectively, the wild type M-MLV RT and the H8Y M-MLV RT are referred to as reference M-MLV RTs.

[0124] In some embodiments, the prime editor comprises a M-MMLV RT comprising one or more of amino acid substitutions P51X, S67X, E69X, L139X, T197X, D200X, H204X, F209X, E302X, T306X, F309X, W313X, T330X, L345X, L435X, N454X, D524X, E562X, D583X, H594X, L603X, E607X, or D653X as compared to the reference M-MMLV RT as set forth in SEQ ID NO: 50, where X is any amino acid other than the amino acid in the corresponding reference M-MLV. In some embodiments, the prime editor comprises a M-MMLV RT comprising one or more of amino acid substitutions P51L, S67K, E69K, L139P, T197A, D200N, H204R, F209N, E302K, E302R, T306K, F309N, W313F, T330P, L345G, L435G, N454K, D524G, E562Q, D583N, H594Q, L603W, E607K, and D653N as compared to the reference M-MMLV RT as set forth in SEQ ID NO: 50. In some embodiments, the prime editor comprises a M-MLV RT comprising one or more amino acid substitutions D200N, T330P, L603W, T306K, and W313F as compared to the reference-MMLV RT as set forth in SEQ ID NO: 50. In some embodiments, the prime editor comprises a M-MLV RT comprising amino acid substitutions D200N, T330P, L603W, T306K, and W313F as compared to the reference M-MMLV RT as set forth in SEQ ID NO: 50. In some embodiments, a prime editor comprising the D200N, T330P, L603W, T306K, and W313F as compared to the reference M-MMLV RT maybe referred to as a “PE2” prime editor, and the corresponding prime editing system a PE2 prime editing system.

[0125] In some embodiments, an RT variant may be a functional fragment of a reference RT that have 1, 2, 3, 4, 5, 6, 7, 8, 9, 10, 11, 12, 13, 14, 15, 16, 17, 18, 19, 20, 21, 22, 21, 24, 25, 26, 27, 28, 29, 30, 31, 32, 33, 34, 35, 36, 37, 38, 39, 40, 41, 42, 43, 44, 45, 46, 47, 48, 49, 50, or up to 100, or up to 200, or up to 300, or up to 400, or up to 500 or more amino acid changes compared to a reference RT, e.g., a reference RT. In some embodiments, the RT variant comprises a fragment of a reference RT, e.g., a reference RT, such that the fragment is about 70% identical, about 80% identical, about 90% identical, about 95% identical, about 96% identical, about 97% identical, about 98% identical, about 99% identical, about 99.5% identical, or about 99.9% identical to the corresponding fragment of the reference RT. In some embodiments, the fragment is 30%, 35%, 40%, 45%, 50%, 55%, 60%, 65%, 70%, 75%, 80%, 85%, 90%, 95% identical, 96%, 97%, 98%, 99%, or 99.5% of the amino acid length of a corresponding reference RT (M-MLV reverse transcriptase) (e.g., SEQ ID NO: 50).

[0126] In some embodiments, the RT functional fragment is at least 100 amino acids in length. In some embodiments, the fragment is at least 100, 150, 200, 250, 300, 350, 400, 450, 500, 550, or up to 600 or more amino acids in length.

[0127] In still other embodiments, the functional RT variant is truncated at the N-terminus or the C-terminus, or both, by a certain number of amino acids which results in a truncated variant which still retains sufficient DNA polymerase function. In some embodiments, the RT truncated variant has a truncation of at least 1, at least 2, at least 3, at least 4, at least 5, at least 6, at least 7, at least 8, at least 9, at least 10, at least 11, at least 12, at least 13, at least 14, at least 15, at least 16, at least 17, at least 18, at least 19, at least 20, at least 21, at least 22, at least 23, at least 24, at least 25, at least 30, 40, 50, 60, 70, 80, 90, 100, 110, 120, 130, 140, 150, 160, 170, 180, 190, 200, 210, 220, 230, 240, or 250 amino acids at the N-terminal end compared to a reference RT, e.g., a wild type RT. In some embodiments, the reference RT is a wild type M-MLV RT. In other embodiments, the RT truncated variant has a truncation of at least 1, at least 2, at least 3, at least 4, at least 5, at least 6, at least 7, at least 8, at least 9, at least 10, at least 11, at least 12, at least 13, at least 14, at least 15, at least 16, at least 17, at least 18, at least 19, at least 20, at least 21, at least 22, at least 23, at least 24, at least 25, at least 30, 40, 50, 60, 70, 80, 90, 100, 110, 120, 130, 140, 150, 160, 170, 180, 190, 200, 210, 220, 230, 240, or 250 amino acids at the C-terminal end compared to a reference RT, e.g., a wild type RT. In some embodiments, the reference RT is a wild type M-MLV RT. In still other embodiments, the RT truncated variant has a truncation at the N-terminal and the C-terminal end compared to a reference RT, e.g., a wild type RT. In some embodiments, the N-terminal truncation and the C-terminal truncation are of the same length. In some embodiments, the N-terminal truncation and the C-terminal truncation are of different lengths.

[0128] For example, the prime editors disclosed herein may include a functional variant of a wild type M-MLV reverse transcriptase. In some embodiments, the prime editor comprises a functional variant of a wild type M-MLV RT, wherein the functional variant of M-MLV RT is truncated after amino acid position 502 compared to a wild type M-MLV RT as set forth in SEQ ID NO: 50. In some embodiments, the functional variant of M-MLV RT further comprises a D200X, T306X, W313X, and/or T330X amino acid substitution compared to compared to a wild type M-MLV RT as set forth in SEQ ID NO: 50, wherein X is any amino acid other than the original amino acid. In some embodiments, the functional variant of M-MLV RT further comprises a D200N, T306K, W313F, and/or T330P amino acid substitution compared to a wild type M-MLV RT as set forth in SEQ ID NO: 50, wherein X is any amino acid other than the original amino acid. A DNA sequence encoding a prime editor comprising this truncated RT is 522 bp smaller than PE2, and therefore makes its potentially useful for applications where delivery of the DNA sequence is challenging due to its size (i.e., adeno-associated virus and lentivirus delivery). In some embodiments, a prime editor comprises a M-MLV RT variant, wherein the M-MLV RT consists of the following amino acid sequence:

(SEQ ID NO: 48)
TLNIEDEYRLHETSKEPDVSLGSTWLSDFPQAWAETGGMGLAVRQAPLI
IPLKATSTPVSIKQYPMSQEARLGIKPHIQRLLDQGILVPCQSPWNTPL
LPVKKPGTNDYRPVQDLREVNKRVEDIHPTVPNPYNLLSGLPPSHQWYT
VLDLKDAFFCLRLHPTSQPLFAFEWRDPEMGISGQLTWTRLPQGFKNSP
TLFNEALHRDLADFRIQHPDLILLQYVDDLLLAATSELDCQQGTRALLQ
TLGNLGYRASAKKAQICQKQVKYLGYLLKEGQRWLTEARKETVMGQPTP
KTPRQLREFLGKAGFCRLFIPGFAEMAAPLYPLTKPGTLFNWGPDQQKA
YQEIKQALLTAPALGLPDLTKPFELFVDEKQGYAKGVLTQKLGPWRRPV
AYLSKKLDPVAAGWPPCLRMVAAIAVLTKDAGKLTMGQPLVILAPHAVE
ALVKQPPDRWLSNARMTHYQALLLDTDRVQFGPVVALNPATLLPLPEEG
LQHNCLDNSRLIN.

[0129] In some embodiments, the functional variant of M-MLV RT comprises a D200N, T306K, W313F, T330P, and L603W amino acid substitution compared to a reference M-MLV RT.

[0130] In some embodiments, a prime editor comprises a eukaryotic RT, for example, a yeast, drosophila, rodent, or primate RT. In some embodiments, the prime editor comprises a Group II intron RT, for example, a. Geobacillus stearothermophilus Group II Intron (GsI-IIC) RT or a Eubacterium rectale group II intron (Eu.re.I2) RT. In some embodiments, the prime editor comprises a retron RT.

### Programmable DNA Binding Domain

[0131] In some embodiments, the DNA-binding domain of a prime editor is a programmable DNA binding domain. A programmable DNA binding domain refers to a protein domain that is designed to bind a specific nucleic acid sequence, e.g., a target DNA or a target RNA. In some embodiments, the DNA-binding domain is a polynucleotide programmable DNA-binding domain that can associate with a guide polynucleotide (e.g., a PEgRNA) that guides the DNA-binding domain to a specific DNA sequence, e.g., a search target sequence in a target gene. In some embodiments, the DNA-binding domain comprises a Clustered Regularly Interspaced Short Palindromic Repeats (CRISPR) Associated (Cas) protein. A Cas protein may comprise any Cas protein described herein or a functional fragment or functional variant thereof. In some embodiments, a DNA-binding domain may also comprise a zinc-finger protein domain. In other cases, a DNA-binding domain comprises a transcription activator-like effector domain (TALE). In some embodiments, the DNA-binding domain comprises a DNA nuclease. For example, the DNA-binding domain of a prime editor may comprise an RNA-guided DNA endonuclease, e.g., a Cas protein. In some embodiments, the DNA-binding domain comprises a zinc finger nuclease (ZFN) or a transcription activator like effector domain nuclease (TALEN), where one or more zinc finger motifs or TALE motifs are associated with one or more nucleases, e.g., a Fok I nuclease domain.

[0132] In some embodiments, the DNA-binding domain comprise a nuclease activity. In some embodiments, the DNA-binding domain of a prime editor comprises an endonuclease domain having single strand DNA cleavage activity. For example, the endonuclease domain may comprise a FokI nuclease domain. In some embodiments, the DNA-binding domain of a prime editor comprises a nuclease having full nuclease activity. In some embodiments, the DNA-binding domain of a prime editor comprises a nuclease having modified or reduced nuclease activity as compared to a wild type endonuclease domain. For example, the endonuclease domain may comprise one or more amino acid substitutions as compared to a wild type endonuclease domain. In some embodiments, the DNA-binding domain of a prime editor has nickase activity. In some embodiments, the DNA-binding domain of a prime editor comprises a Cas protein domain that is a nickase. In some embodiments, compared to a wild type Cas protein, the Cas nickase comprises one or more amino acid substitutions in a nuclease domain that reduces or abolishes its double strand nuclease activity but retains DNA binding activity. In some embodiments, the Cas nickase comprises an amino acid substitution in a HNH domain. In some embodiments, the Cas nickase comprises an amino acid substitution in a RuvC domain.

[0133] In some embodiments, the DNA-binding domain comprises a CRISPR associated protein (Cas protein) domain. A Cas protein may be a Class 1 or a Class 2 Cas protein. A Cas protein can be a type I, type II, type III, type IV, type V Cas protein, or a type VI Cas protein. Non-limiting examples of Cas proteins include Cas9, Cas12a (Cpf1), Cas12e (CasX), Cas12d (CasY), Cas12b1 (C2c1), Cas12b2, Cas12c (C2c3), C2c4, C2c8, C2c5, C2c10, C2c9, Cas14a, Cas14b, Cas14c, Cas14d, Cas14e, Cas14f, Cas14g, Cas14h, Cas14u, Cns2, Cas Φ, and homologs, functional fragments, or modified versions thereof. A Cas protein can be a chimeric Cas protein that is fused to other proteins or polypeptides. A Cas protein can be a chimera of various Cas proteins, for example, comprising domains of Cas proteins from different organisms.

[0134] A Cas protein, e.g., Cas9, can be from any suitable organism. In some aspects, the organism is Streptococcus pyogenes (S. pyogenes). In some aspects, the organism is Staphylococcus aureus (S. aureus). In some aspects, the organism is Streptococcus thermophilus (S. thermophilus). In some embodiments, the organism is Staphylococcus lugdunensis.

[0135] A Cas protein, e.g., Cas9, can be a wild type or a modified form of a Cas protein. A Cas protein, e.g., Cas9, can be a nuclease active variant, nuclease inactive variant, a nickase, or a functional variant or functional fragment of a wild type Cas protein. A Cas protein, e.g., Cas9, can comprise an amino acid change such as a deletion, insertion, substitution, fusion, chimera, or any combination thereof relative to a wild-type version of the Cas protein. A Cas protein can be a polypeptide with at least about 50%, 60%, 70%, 80%, 90%, 91%, 92%, 93%, 94%, 95%, 96%, 97%, 98%, 99%, or 100% sequence identity or sequence similarity to a wild type exemplary Cas protein.

[0136] A Cas protein, e.g., Cas9, may comprise one or more domains. Non-limiting examples of Cas domains include, guide nucleic acid recognition and/or binding domain, nuclease domains (e.g., DNase or RNase domains, RuvC, HNH), DNA binding domain, RNA binding domain, helicase domains, protein-protein interaction domains, and dimerization domains. In various embodiments, a Cas protein comprises a guide nucleic acid recognition and/or binding domain can interact with a guide nucleic acid, and one or more nuclease domains that comprise catalytic activity for nucleic acid cleavage.

[0137] In some embodiments, a Cas protein, e.g., Cas9, comprises one or more nuclease domains. A Cas protein can comprise an amino acid sequence having at least about 50%, 60%, 70%, 80%, 90%, 91%, 92%, 93%, 94%, 95%, 96%, 97%, 98%, 99%, or 100% sequence identity to a nuclease domain (e.g., RuvC domain, HNH domain) of a wild-type Cas protein. In some embodiments, a Cas protein comprises a single nuclease domain. For example, a Cpf1 may comprise a RuvC domain but lacks HNH domain. In some embodiments, a Cas protein comprises two nuclease domains, e.g., a Cas9 protein can comprise an HNH nuclease domain and a RuvC nuclease domain.

[0138] In some embodiments, a prime editor comprises a Cas protein, e.g., Cas9, wherein all nuclease domains of the Cas protein are active. In some embodiments, a prime editor comprises a Cas protein having one or more inactive nuclease domains. One or a plurality of the nuclease domains (e.g., RuvC, HNH) of a Cas protein can be deleted or mutated so that they are no longer functional or comprise reduced nuclease activity. In some embodiments, a Cas protein, e.g., Cas9, comprising mutations in a nuclease domain has reduced (e.g., nickase) or abolished nuclease activity while maintaining its ability to target a nucleic acid locus at a search target sequence when complexed with a guide nucleic acid, e.g., a PEgRNA.

[0139] In some embodiments, a prime editor comprises a Cas nickase that can bind to the target gene in a sequence-specific manner and generate a single-strand break at a protospacer within double-stranded DNA in the target gene, but not a double-strand break. For example, the Cas nickase can cleave the edit strand or the non-edit strand of the target gene, but may not cleave both. In some embodiments, a prime editor comprises a Cas nickase comprising two nuclease domains (e.g., Cas9), with one of the two nuclease domains modified to lack catalytic activity or deleted. In some embodiments, the Cas nickase of a prime editor comprises a nuclease inactive RuvC domain and a nuclease active HNH domain. In some embodiments, the Cas nickase of a prime editor comprises a nuclease inactive HNH domain and a nuclease active RuvC domain. In some embodiments, a prime editor comprises a Cas9 nickase having an amino acid substitution in the RuvC domain. In some embodiments, the Cas9 nickase comprises a D10X amino acid substitution compared to a wild type S. pyogenes Cas9, wherein X is any amino acid other than D. In some embodiments, a prime editor comprises a Cas9 nickase having an amino acid substitution in the HNH domain. In some embodiments, the Cas9 nickase comprises a H840X amino acid substitution compared to a wild type S. pyogenes Cas9, wherein X is any amino acid other than H.

[0140] In some embodiments, a prime editor comprises a Cas protein that can bind to the target gene in a sequence-specific manner but lacks or has abolished nuclease activity and may not cleave either strand of a double stranded DNA in a target gene. Abolished activity or lacking activity can refer to an enzymatic activity less than 1%, less than 2%, less than 3%, less than 4%, less than 5%, less than 6%, less than 7%, less than 8%, less than 9%, or less than 10% activity compared to a wild-type exemplary activity (e.g., wild-type Cas9 nuclease activity). In some embodiments, a Cas protein of a prime editor completely lacks nuclease activity. A nuclease, e.g., Cas9, that lacks nuclease activity may be referred to as nuclease inactive or “nuclease dead” (abbreviated by “d”). A nuclease dead Cas protein (e.g., dCas, dCas9) can bind to a target polynucleotide but may not cleave the target polynucleotide. In some aspects, a dead Cas protein is a dead Cas9 protein. In some embodiments, a prime editor comprises a nuclease dead Cas protein wherein all of the nuclease domains (e.g., both RuvC and HNH nuclease domains in a Cas9 protein; RuvC nuclease domain in a Cpf1 protein) are mutated to lack catalytic activity, or are deleted.

[0141] A Cas protein can be modified. A Cas protein, e.g., Cas9, can be modified to increase or decrease nucleic acid binding affinity, nucleic acid binding specificity, and/or enzymatic activity. Cas proteins can also be modified to change any other activity or property of the protein, such as stability. For example, one or more nuclease domains of the Cas protein can be modified, deleted, or inactivated, or a Cas protein can be truncated to remove domains that are not essential for the function of the protein or to optimize (e.g., enhance or reduce) the activity of the Cas protein.

[0142] A Cas protein can be a fusion protein. For example, a Cas protein can be fused to a cleavage domain, an epigenetic modification domain, a transcriptional regulation domain, or a polymerase domain. A Cas protein can also be fused to a heterologous polypeptide providing increased or decreased stability. The fused domain or heterologous polypeptide can be located at the N-terminus, the C-terminus, or internally within the Cas protein.

[0143] In some embodiments, the Cas protein of a prime editor is a Class 2 Cas protein. In some embodiments, the Cas protein is a type II Cas protein. In some embodiments, the Cas protein is a Cas9 protein, a modified version of a Cas9 protein, a Cas9 protein homolog, mutant, variant, or a functional fragment thereof. As used herein, a Cas9, Cas9 protein, Cas9 polypeptide or a Cas9 nuclease refers to an RNA guided nuclease comprising one or more Cas9 nuclease domains and a Cas9 gRNA binding domain having the ability to bind a guide polynucleotide, e.g., a PEgRNA. A Cas9 protein may refer to a wild type Cas9 protein from any organism or a homolog, ortholog, or paralog from any organisms; any functional mutants or functional variants thereof; or any functional fragments or domains thereof. In some embodiments, a prime editor comprises a full-length Cas9 protein. In some embodiments, the Cas9 protein can generally comprises at least about 50%, 60%, 70%, 80%, 90%, 100% sequence identity to a wild type reference Cas9 protein (e.g., Cas9 from S. pyogenes). In some embodiments, the Cas9 comprises an amino acid change such as a deletion, insertion, substitution, fusion, chimera, or any combination thereof as compared to a wild type reference Cas9 protein.

[0144] In some embodiments, a Cas9 protein may comprise a Cas9 protein from Streptococcus pyogenes (Sp), Staphylococcus aureus (Sa), Streptococcus canis (Sc), Streptococcus thermophilus (St), Staphylococcus lugdunensis (Slu), Neisseria meningitidis (Nm), Campylobacter jejuni (Cj), Francisella novicida (Fn), or Treponema denticola (Td), or any Cas9 homolog or ortholog from an organism known in the art. In some embodiments, a Cas9 polypeptide is a SpCas9 polypeptide. In some embodiments, a Cas9 polypeptide is a SaCas9 polypeptide. In some embodiments, a Cas9 polypeptide is a ScCas9 polypeptide. In some embodiments, a Cas9 polypeptide is a StCas9 polypeptide. In some embodiments, a Cas9 polypeptide is a SluCas9 polypeptide. In some embodiments, a Cas9 polypeptide is a NmCas9 polypeptide. In some embodiments, a Cas9 polypeptide is a CjCas9 polypeptide. In some embodiments, a Cas9 polypeptide is a FnCas9 polypeptide. In some embodiments, a Cas9 polypeptide is a TdCas9 polypeptide. In some embodiments, a Cas9 polypeptide is a chimera comprising domains from two or more of the organisms described herein or those known in the art. In some embodiments, a Cas9 polypeptide is a Cas9 polypeptide from Streptococcus macacae. In some embodiments, a Cas9 polypeptide is a Cas9 polypeptide generated by replacing a PAM interaction domain of a SpCas9 with that of a Streptococcus macacae Cas9 (Spy-mac Cas9).

[0145] An exemplary Streptococcus pyogenes Cas9 (SpCas9) amino acid sequence is provided in SEQ ID NO: 51.

[0146] In some embodiments, a prime editor comprises a Cas9 protein from Staphylococcus lugdunensis (Slu Cas9). An exemplary amino acid sequence of a Slu Cas9 is provided in SEQ ID NO: 52.

[0147] In some embodiments, a Cas9 protein comprises a variant Cas9 protein containing one or more amino acid substitutions. In some embodiments, a wildtype Cas9 protein comprises a RuvC domain and an HNH domain. In some embodiments, a prime editor comprises a nuclease active Cas9 protein that may cleave both strands of a double stranded target DNA sequence. In some embodiments, the nuclease active Cas9 protein comprises a functional RuvC domain and a functional HNH domain. In some embodiments, a prime editor comprises a Cas9 nickase that can bind to a guide polynucleotide and recognize a target DNA, but can cleave only one strand of a double stranded target DNA. In some embodiments, the Cas9 nickase comprises only one functional RuvC domain or one functional HNH domain. In some embodiments, a prime editor comprises a Cas9 that has a non-functional HNH domain and a functional RuvC domain. In some embodiments, the prime editor can cleave the edit strand (i.e., the PAM strand), but not the non-edit strand of a double stranded target DNA sequence. In some embodiments, a prime editor comprises a Cas9 having a non-functional RuvC domain that can cleave the target strand (i.e., the non-PAM strand), but not the edit strand of a double stranded target DNA sequence. In some embodiments, a prime editor comprises a Cas9 that has neither a functional RuvC domain nor a functional HNH domain, which may not cleave any strand of a double stranded target DNA sequence.

[0148] In some embodiments, a prime editor comprises a Cas9 having a mutation in the RuvC domain that reduces or abolishes the nuclease activity of the RuvC domain. In some embodiments, the Cas9 comprise a mutation at amino acid D10 as compared to a wild type SpCas9 as set forth in SEQ ID NO: 51, or a corresponding mutation thereof. In some embodiments, the Cas9 comprise a D10A mutation as compared to a wild type SpCas9 as set forth in SEQ ID NO: 51, or a corresponding mutation thereof. In some embodiments, the Cas9 polypeptide comprise a mutation at amino acid D10, G12, and/or G17 as compared to a wild type SpCas9 as set forth in SEQ ID NO: 51, or a corresponding mutation thereof. In some embodiments, the Cas9 polypeptide comprise a D10A mutation, a G12A mutation, and/or a G17A mutation as compared to a wild type SpCas9 as set forth in SEQ ID NO: 51, or a corresponding mutation thereof.

[0149] In some embodiments, a prime editor comprises a Cas9 polypeptide having a mutation in the HNH domain that reduces or abolishes the nuclease activity of the HNH domain. In some embodiments, the Cas9 polypeptide comprise a mutation at amino acid H840 as compared to a wild type SpCas9 as set forth in SEQ ID NO: 51, or a corresponding mutation thereof. In some embodiments, the Cas9 polypeptide comprise a H840A mutation as compared to a wild type SpCas9 as set forth in SEQ ID NO: 51, or a corresponding mutation thereof. In some embodiments, the Cas9 polypeptide comprise a mutation at amino acid E762, D839, H840, N854, N856, N863, H982, H983, A984, D986, and/or a A987 as compared to a wild type SpCas9 as set forth in SEQ ID NO: 51, or a corresponding mutation thereof. In some embodiments, the Cas9 polypeptide comprise a E762A, D839A, H840A, N854A, N856A, N863A, H982A, H983A, A984A, and/or a D986A mutation as compared to a wild type SpCas9 as set forth in SEQ ID NO: 51, or a corresponding mutation thereof.

[0150] In some embodiments, a prime editor comprises a Cas9 having one or more amino acid substitutions in both the HNH domain and the RuvC domain that reduce or abolish the nuclease activity of both the HNH domain and the RuvC domain. In some embodiments, the prime editor comprises a nuclease inactive Cas9, or a nuclease dead Cas9 (dCas9). In some embodiments, the dCas9 comprises a H840X substitution and a DIOX mutation compared to a wild type SpCas9 as set forth in SEQ ID NO: 51 or corresponding mutations thereof, wherein X is any amino acid other than H for the H840X substitution and any amino acid other than D for the D10X substitution. In some embodiments, the dead Cas9 comprises a H840A and a D10A mutation as compared to a wild type SpCas9 as set forth in SEQ ID NO: 51, or corresponding mutations thereof.

[0151] In some embodiments, the N-terminal methionine is removed from a Cas9 nickase, or from any Cas9 variant, ortholog, or equivalent disclosed or contemplated herein. For example, methionine-minus Cas9 nickases include the following sequences, or a variant thereof having an amino acid sequence that has at least 80%, at least 85%, at least 90%, at least 95%, or at least 99% sequence identity thereto.

[0152] Besides dead Cas9 and Cas9 nickase variants, the Cas9 proteins used herein may also include other Cas9 variants having at least about 70% identical, at least about 80% identical, at least about 90% identical, at least about 95% identical, at least about 96% identical, at least about 97% identical, at least about 98% identical, at least about 99% identical, at least about 99.5% identical, or at least about 99.9% identical to any reference Cas9 protein, including any wild type Cas9, or mutant Cas9 (e.g., a dead Cas9 or Cas9 nickase), or fragment Cas9, or circular permutant Cas9, or other variant of Cas9 disclosed herein or known in the art. In some embodiments, a Cas9 variant may have 1, 2, 3, 4, 5, 6, 7, 8, 9, 10, 11, 12, 13, 14, 15, 16, 17, 18, 19, 20, 21, 22, 21, 24, 25, 26, 27, 28, 29, 30, 31, 32, 33, 34, 35, 36, 37, 38, 39, 40, 41, 42, 43, 44, 45, 46, 47, 48, 49, 50 or more amino acid changes compared to a reference Cas9, e.g., a wild type Cas9. In some embodiments, the Cas9 variant comprises a fragment of a reference Cas9 (e.g., a gRNA binding domain or a DNA-cleavage domain), such that the fragment is at least about 70% identical, at least about 80% identical, at least about 90% identical, at least about 95% identical, at least about 96% identical, at least about 97% identical, at least about 98% identical, at least about 99% identical, at least about 99.5% identical, or at least about 99.9% identical to the corresponding fragment of the reference Cas9, e.g., a wild type Cas9. In some embodiments, the fragment is at least 30%, at least 35%, at least 40%, at least 45%, at least 50%, at least 55%, at least 60%, at least 65%, at least 70%, at least 75%, at least 80%, at least 85%, at least 90%, at least 95% identical, at least 96%, at least 97%, at least 98%, at least 99%, or at least 99.5% of the amino acid length of a corresponding wild type Cas9.

[0153] In some embodiments, a Cas9 fragment is a functional fragment that retains one or more Cas9 activities. In some embodiments, the Cas9 fragment is at least 100 amino acids in length. In some embodiments, the fragment is at least 100, 150, 200, 250, 300, 350, 400, 450, 500, 550, 600, 650, 700, 750, 800, 850, 900, 950, 1000, 1050, 1100, 1150, 1200, 1250, or at least 1300 amino acids in length.

[0154] In some embodiments, a prime editor comprises a Cas protein, e.g., Cas9, containing modifications that allow altered PAM recognition. In prime editing using a Cas-protein-based prime editor, a “protospacer adjacent motif (PAM)”, PAM sequence, or PAM-like motif, may be used to refer to a short DNA sequence immediately following the protospacer sequence on the PAM strand of the target gene. In some embodiments, the PAM is recognized by the Cas nuclease in the prime editor during prime editing. In certain embodiments, the PAM is required for target binding of the Cas protein. The specific PAM sequence required for Cas protein recognition may depend on the specific type of the Cas protein. A PAM can be 1, 2, 3, 4, 5, 6, 7, 8, 9, 10 or more nucleotides in length. In some embodiments, a PAM is between 2-6 nucleotides in length. In some embodiments, the PAM can be a 5′ PAM (i.e., located upstream of the 5′ end of the protospacer). In other embodiments, the PAM can be a 3′ PAM (i.e., located downstream of the 5′ end of the protospacer). In some embodiments, the Cas protein of a prime editor recognizes a canonical PAM, for example, a SpCas9 recognizes 5′-NGG-3′ PAM. In some embodiments, the Cas protein of a prime editor has altered or non-canonical PAM specificities. Exemplary PAM sequences and corresponding Cas variants are described in Table 1 below. It should be appreciated that for each of the variants provided, the Cas protein comprises one or more of the amino acid substitutions as indicated compared to a wild type Cas protein sequence, for example, the Cas9 as set forth in SEQ ID NO: 51. The PAM motifs as shown in Table 1 below are in the order of 5′ to 3′.

[0155] The nucleotides listed in Table 1 are represented by the base codes as provided in the Handbook on Industrial Property Information and Documentation, World Intellectual Property Organization (WIPO) Standard ST.26, Version 1.4. For example, an “R” in Table 1 represents the nucleotide A or G, and “W” in Table 1 represents A or T.

TABLE 1
Cas protein variants and corresponding PAM sequences

| Variant | PAM |
|---|---|
| spCas9 (wild type) | NGG, NGA, |
| | NAG, NGNGA |
| spCas9- VRVRFRR R1335V, L1111R, D1135V, | NG |
| G1218R, E1219F, A1322R, T1337R | |
| spCas9-VQR (D1135V, R1335Q, T1337R) | NGA |
| spCas9-EQR (D1135E, R1335Q, T1337R) | NGA |
| spCas9-VRER (D1135V, G1218R, R1335E, T1337R) | NGCG |
| spCas9-VRQR (D1135V, G1218R, R1335Q, T1337R) | NGA |
| Cas9-NG (L1111R, D1135V, G1218R, E1219F, | NGN |
| A1322R, T1337R, R1335V) | |
| SpG Cas9 (D1135L, S1136W, G1218K, E1219Q, | NGN |
| R1335Q, T1337R) | |
| SyRY Cas9 | NRN |
| (A61R, L1111R, N1317R, A1322R, and R1333P) | |
| xCas9 (E480K, E543D, E1219V, K294R, Q1256K, | NGN |
| A262T, S409I, M694I) | |
| SluCa9 | NNGG |
| sRGN1, sRGN2, sRGN4, sRGN3.1, sRGN3.3 | NNGG |
| saCas9 | NNGRRT, |
| | NNGRRN |
| saCas9-KKH (E782K, N968K, R1015H) | NNNRRT |
| spCas9-MQKSER (D1135M, S1136Q, G1218K, | NGCG/NGCN |
| E1219S, R1335E, T1337R) | |
| spCas9-LRKIQK (D1135L, S1136R, G1218K, | NGTN |
| E1219I, R1335Q, T1337K) | |
| spCas9-LRVSQK (D1135L, S1136R, G1218V, | NGTN |
| E1219S, R1335Q, T1337K) | |
| spCas9-LRVSQL(D1135L, S1136R, G1218V, | NGTN |
| E1219S, R1335Q, T1337L) | |
| Cpf1 | TTTV |
| Spy-Mac | NAA |
| NmCas9 | NNNNGATT |
| StCas9 | NNAGAAW |
| TdCas9 | NAAAAC |

[0156] In some embodiments, a prime editor comprises a Cas9 polypeptide comprising one or mutations selected from the group consisting of: A61R, L111R, D1135V, R221K, A262T, R324L, N394K, S409I, S409I, E427G, E480K, M495V, N497A, Y515N, K526E, F539S, E543D, R654L, R661A, R661L, R691A, N692A, M694A, M694I, Q695A, H698A, R753G, M763I, K848A, K890N, Q926A, K1003A, R1060A, L1111R, R1114G, D1135E, D1135L, D1135N, S1136W, V1139A, D1180G, G1218K, G1218R, G1218S, E1219Q, E1219V, E1219V, Q1221H, P1249S, E1253K, N1317R, A1320V, P1321S, A1322R, I1322V, D1332G, R1332N, A1332R, R1333K, R1333P, R1335L, R1335Q, R1335V, T1337N, T1337R, S1338T, H1349R, and any combinations thereof as compared to a wildtype SpCas9 polypeptide as set forth in SEQ ID NO: 51.

[0157] In some embodiments, a prime editor comprises a SaCas9 polypeptide. In some embodiments, the SaCas9 polypeptide comprises one or more of mutations E782K, N968K, and R1015H as compared to a wild type SaCas9. In some embodiments, a prime editor comprises a FnCas9 polypeptide, for example, a wildtype FnCas9 polypeptide or a FnCas9 polypeptide comprising one or more of mutations E1369R, E1449H, or R1556A as compared to the wild type FnCas9. In some embodiments, a prime editor comprises a Sc Cas9, for example, a wild type ScCas9 or a ScCas9 polypeptide comprises one or more of mutations 1367K, G368D, I369K, H371L, T375S, T376G, and T1227K as compared to the wild type ScCas9. In some embodiments, a prime editor comprises a St1 Cas9 polypeptide, a St3 Cas9 polypeptide, or a Slu Cas9 polypeptide.

[0158] In some embodiments, a prime editor comprises a Cas polypeptide that comprises a circular permutant Cas variant. For example, a Cas9 polypeptide of a prime editor may be engineered such that the N-terminus and the C-terminus of a Cas9 protein (e.g., a wild type Cas9 protein, or a Cas9 nickase) are topically rearranged to retain the ability to bind DNA when complexed with a guide RNA (gRNA). An exemplary circular permutant configuration may be N-terminus—[original C-terminus]—[original N-terminus]—C-terminus. Any of the Cas9 proteins described herein, including any variant, ortholog, or naturally occurring Cas9 or equivalent thereof, may be reconfigured as a circular permutant variant.

[0159] In various embodiments, the circular permutants of a Cas protein, e.g., a Cas9, may have the following structure: N-terminus—[original C-terminus]—[optional linker]—[original N-terminus]—C-terminus. In some embodiments, a circular permutant Cas9 comprises any one of the following structures (amino acid positions as set forth in SEQ ID NO: 51):
[0160] N-terminus—[1268-1368]—[optional linker]—[1-1267]—C-terminus;
[0161] N-terminus—[1168-1368]—[optional linker]—[1-1167]—C-terminus;
[0162] N-terminus—[1068-1368]—[optional linker]—[1-1067]—C-terminus;
[0163] N-terminus—[968-1368]—[optional linker]—[1-967]—C-terminus;
[0164] N-terminus—[868-1368]—[optional linker]—[1-867]—C-terminus;
[0165] N-terminus—[768-1368]—[optional linker]—[1-767]—C-terminus;
[0166] N-terminus—[668-1368]—[optional linker]—[1-667]—C-terminus;
[0167] N-terminus—[568-1368]—[optional linker]—[1-567]—C-terminus;
[0168] N-terminus—[468-1368]—[optional linker]—[1-467]—C-terminus;
[0169] N-terminus—[368-1368]—[optional linker]—[1-367]—C-terminus;
[0170] N-terminus—[268-1368]—[optional linker]—[1-267]—C-terminus;
[0171] N-terminus—[168-1368]—[optional linker]—[1-167]—C-terminus;
[0172] N-terminus—[68-1368]—[optional linker]—[1-67]—C-terminus;
[0173] N-terminus—[10-1368]—[optional linker]—[1-9]—C-terminus, or the corresponding circular permutants of other Cas9 proteins (including other Cas9 orthologs, variants, etc).

[0174] In some embodiments, a circular permutant Cas9 comprises any one of the following structures (amino acid positions as set forth in SEQ ID NO: 51-1368 amino acids of UniProtKB-Q99ZW2:
[0175] N-terminus—[102-1368]—[optional linker]—[1-101]—C-terminus;
[0176] N-terminus—[1028-1368]—[optional linker]—[1-1027]—C-terminus;
[0177] N-terminus—[1041-1368]—[optional linker]—[1-1043]—C-terminus;
[0178] N-terminus—[1249-1368]—[optional linker]—[1-1248]—C-terminus; or
[0179] N-terminus—[1300-1368]—[optional linker]—[1-1299]—C-terminus, or the corresponding circular permutants of other Cas9 proteins (including other Cas9 orthologs, variants, etc).

[0180] In some embodiments, a circular permutant Cas9 comprises any one of the following structures (amino acid positions as set forth in SEQ ID NO: 51-1368 amino acids of UniProtKB-Q99ZW2 N-terminus—[103-1368]—[optional linker]—[1-102]—C-terminus:
[0181] N-terminus—[1029-1368]—[optional linker]—[1-1028]—C-terminus;
[0182] N-terminus—[1042-1368]—[optional linker]—[1-1041]—C-terminus;
[0183] N-terminus—[1250-1368]—[optional linker]—[1-1249]—C-terminus; or
[0184] N-terminus—[1301-1368]—[optional linker]—[1-1300]—C-terminus, or the corresponding circular permutants of other Cas9 proteins (including other Cas9 orthologs, variants, etc).

[0185] In some embodiments, the circular permutant can be formed by linking a C-terminal fragment of a Cas9 to an N-terminal fragment of a Cas9, either directly or by using a linker, such as an amino acid linker. In some embodiments, thee C-terminal fragment may correspond to the 95% or more of the C-terminal amino acids of a Cas9 (e.g., amino acids about 1300-1368 as set forth in SEQ ID NO: 51 or corresponding amino acid positions thereof), or the 90%, 85%, 80%, 75%, 70%, 65%, 60%, 55%, 50%, 45%, 40%, 35%, 30%, 25%, 20%, 15%, 10%, or 5% or more of the C-terminal amino acids of a Cas9 (e.g., SEQ ID NO: 51 or a ortholog or a variant thereof). The N-terminal portion may correspond to 95% or more of the N-terminal amino acids of a Cas9 (e.g., amino acids about 1-1300 as set forth in SEQ ID NO: 51 or corresponding amino acid positions thereof), or 90%, 85%, 80%, 75%, 70%, 65%, 60%, 55%, 50%, 45%, 40%, 35%, 30%, 25%, 20%, 15%, 10%, or 5% or more of the N terminal amino acids of a Cas9 (e.g., as set forth in SEQ ID NO: 51 or corresponding amino acid positions thereof).

[0186] In some embodiments, the circular permutant can be formed by linking a C-terminal fragment of a Cas9 to an N-terminal fragment of a Cas9, either directly or by using a linker, such as an amino acid linker. In some embodiments, the C-terminal fragment that is rearranged to the N-terminus includes or corresponds to the C-terminal 30% or less of the amino acids of a Cas9 (e.g., amino acids 1012-1368 as set forth in SEQ ID NO: 51 or corresponding amino acid positions thereof). In some embodiments, the C-terminal fragment that is rearranged to the N-terminus, includes or corresponds to the C-terminal 30%, 29%, 28%, 27%, 26%, 25%, 24%, 23%, 22%, 21%, 20%, 19%, 18%, 17%, 16%, 15%, 14%, 13%, 12%, 11%, 10%, 9%, 8%, 7%, 6%, 5%, 4%, 3%, 2%, or 1% of the amino acids of a Cas9 (e.g., as set forth in SEQ ID NO: 51 or corresponding amino acid positions thereof). In some embodiments, the C-terminal fragment that is rearranged to the N-terminus, includes or corresponds to the C-terminal 410 residues or less of a Cas9 (e.g., as set forth in SEQ ID NO: 51 or corresponding amino acid positions thereof). In some embodiments, the C-terminal portion that is rearranged to the N-terminus, includes or corresponds to the C-terminal 410, 400, 390, 380, 370, 360, 350, 340, 330, 320, 310, 300, 290, 280, 270, 260, 250, 240, 230, 220, 210, 200, 190, 180, 170, 160, 150, 140, 130, 120, 110, 100, 90, 80, 70, 60, 50, 40, 30, 20, or 10 residues of a Cas9 (e/g/as set forth in SEQ ID NO: 51 or corresponding amino acid positions thereof). In some embodiments, the C-terminal portion that is rearranged to the N-terminus includes or corresponds to the C-terminal 357, 341, 328, 120, or 69 residues of a Cas9 (e.g., as set forth in SEQ ID NO: 51 or corresponding amino acid positions thereof).

[0187] In other embodiments, circular permutant Cas9 variants may be a topological rearrangement of a Cas9 primary structure based on the following method, which is based on S. pyogenes Cas9 of SEQ ID NO: 51: (a) selecting a circular permutant (CP) site corresponding to an internal amino acid residue of the Cas9 primary structure, which dissects the original protein into two halves: an N-terminal region and a C-terminal region; (b) modifying the Cas9 protein sequence (e.g., by genetic engineering techniques) by moving the original C-terminal region (comprising the CP site amino acid) to precede the original N-terminal region, thereby forming a new N-terminus of the Cas9 protein that now begins with the CP site amino acid residue. The CP site can be located in any domain of the Cas9 protein, including, for example, the helical-II domain, the RuvCIII domain, or the CTD domain. For example, the CP site may be located (as set forth in SEQ ID NO: 51 or corresponding amino acid positions thereof) at original amino acid residue 181, 199, 230, 270, 310, 1010, 1016, 1023, 1029, 1041, 1247, 1249, or 1282. Thus, once relocated to the N-terminus, original amino acid 181, 199, 230, 270, 310, 1010, 1016, 1023, 1029, 1041, 1247, 1249, or 1282 would become the new N-terminal amino acid. Nomenclature of these CP-Cas9 proteins may be referred to as Cas9-CP¹⁸¹, Cas9-CP¹⁹⁹, Cas9-CP²³⁰, Cas9-CP²⁷⁰, Cas9-CP³¹⁰, Cas9-CP¹⁰¹⁰, Cas9-CP¹⁰¹⁶, Cas9-CP¹⁰²³, Cas9-CP¹⁰²⁹, Cas9-CP¹⁰⁴¹, Cas9-CP¹²⁴⁷, Cas9-CP¹²⁴⁹, and Cas9-CP¹²⁸², respectively. This description is not meant to be limited to making CP variants from SEQ ID NO: 51, but may be implemented to make CP variants in any Cas9 sequence, either at CP sites that correspond to these positions, or at other CP sites entirely. This description is not meant to limit the specific CP sites in any way. Virtually any CP site may be used to form a CP-Cas9 variant.

[0188] In some embodiments, a prime editor comprises a Cas9 functional variant that is of smaller molecular weight than a wild type SpCas9 protein. In some embodiments, a smaller-sized Cas9 functional variant may facilitate delivery to cells, e.g., by an expression vector, nanoparticle, or other means of delivery. In certain embodiments, a smaller-sized Cas9 functional variant is a Class 2 Type II Cas protein. In certain embodiments, a smaller-sized Cas9 functional variant is a Class 2 Type V Cas protein. In certain embodiments, a smaller-sized Cas9 functional variant is a Class 2 Type VI Cas protein.

[0189] In some embodiments, a prime editor comprises a SpCas9 that is 1368 amino acids in length and has a predicted molecular weight of 158 kilodaltons. In some embodiments, a prime editor comprises a Cas9 functional variant or functional fragment that is less than 1300 amino acids, less than 1290 amino acids, than less than 1280 amino acids, less than 1270 amino acids, less than 1260 amino acid, less than 1250 amino acids, less than 1240 amino acids, less than 1230 amino acids, less than 1220 amino acids, less than 1210 amino acids, less than 1200 amino acids, less than 1190 amino acids, less than 1180 amino acids, less than 1170 amino acids, less than 1160 amino acids, less than 1150 amino acids, less than 1140 amino acids, less than 1130 amino acids, less than 1120 amino acids, less than 1110 amino acids, less than 1100 amino acids, less than 1050 amino acids, less than 1000 amino acids, less than 950 amino acids, less than 900 amino acids, less than 850 amino acids, less than 800 amino acids, less than 750 amino acids, less than 700 amino acids, less than 650 amino acids, less than 600 amino acids, less than 550 amino acids, or less than 500 amino acids, but at least larger than about 400 amino acids and retaining the one or more functions, e.g., DNA binding function, of the Cas9 protein.

[0190] In some embodiments, the Cas protein may include any CRISPR associated protein, including but not limited to, Cas12a, Cas12b1, Cas1, Cas1B, Cas2, Cas3, Cas4, Cas5, Cas6, Cas7, Cas8, Cas9 (also known as Csn1 and Csx12), Cas10, Csy1, Csy2, Csy3, Cse1, Cse2, Csc1, Csc2, Csa5, Csn2, Csm2, Csm3, Csm4, Csm5, Csm6, Cmr1, Cmr3, Cmr4, Cmr5, Cmr6, Csb1, Csb2, Csb3, Csx17, Csx14, Csx10, Csx16, CsaX, Csx3, Csx1, Csx15, Csf1, Csf2, Csf3, Csf4, homologs thereof, or modified versions thereof, and preferably comprising a nickase mutation (e.g., a mutation corresponding to the D10A mutation of the wild type Cas9 polypeptide of SEQ ID NO: 51). In various other embodiments, the napDNAbp can be any of the following proteins: a Cas9, a Cas12a (Cpf1), a Cas12e (CasX), a Cas12d (CasY), a Cas12b1 (C2c1), a Cas13a (C2c2), a Cas12c (C2c3), a GeoCas9, a CjCas9, a Cas12g, a Cas12h, a Cas12i, a Cas13b, a Cas13c, a Cas13d, a Cas14, a Csn2, an xCas9, an SpCas9-NG, a circularly permuted Cas9, or an Argonaute (Ago) domain, or a functional variant or fragment thereof.

[0191] Exemplary Cas proteins and nomenclature are shown in Table 2 below:

TABLE 2
Exemplary Cas proteins and nomenclature

| | |
|---|---|
| Legacy nomenclature | Current nomenclature |

type II CRISPR-Cas enzymes

| | |
|---|---|
| Cas9 | same |

type V CRISPR-Cas enzymes

| | |
|---|---|
| Cpf1 | Cas12a |
| CasX | Cas12e |
| C2c1 | Cas12b1 |
| Cas12b2 | same |
| C2c3 | Cas12c |
| CasY | Cas12d |
| C2c4 | same |
| C2c8 | same |
| C2c5 | same |
| C2c10 | same |
| C2c9 | same |

type VI CRISPR-Cas enzymes

| | |
|---|---|
| C2c2 | Cas13a |
| Cas13d | same |
| C2c7 | Cas13c |
| C2c6 | Cas13b |

[0192] In some embodiments, a prime editor as described herein may comprise a Cas12a (Cpf1) polypeptide or functional variants thereof. In some embodiments, the Cas12a polypeptide comprises a mutation that reduces or abolishes the endonuclease domain of the Cas12a polypeptide. In some embodiments, the Cas12a polypeptide is a Cas12a nickase. In some embodiments, the Cas protein comprises an amino acid sequence that comprises at least about 50%, 60%, 70%, 80%, 90%, 91%, 92%, 93%, 94%, 95%, 96%, 97%, 98%, 99%, or 100% sequence identity to a naturally occurring Cas12a polypeptide.

[0193] In some embodiments, a prime editor comprises a Cas protein that is a Cas12b (C2c1) or a Cas12c (C2c3) polypeptide. In some embodiments, the Cas protein comprises an amino acid sequence that comprises at least about 50%, 60%, 70%, 80%, 90%, 91%, 92%, 93%, 94%, 95%, 96%, 97%, 98%, 99%, or 100% sequence identity to a naturally occurring Cas12b (C2c1) or Cas12c (C2c3) protein. In some embodiments, the Cas protein is a Cas12b nickase or a Cas12c nickase. In some embodiments, the Cas protein is a Cas12e, a Cas12d, a Cas13, Cas14a, Cas14b, Cas14c, Cas14d, Cas14e, Cas14f, Cas14g, Cas14h, Cas14u, or a Cas Φ polypeptide. In some embodiments, the Cas protein comprises an amino acid sequence that comprises at least about 50%, 60%, 70%, 80%, 90%, 91%, 92%, 93%, 94%, 95%, 96%, 97%, 98%, 99%, or 100% sequence identity to a naturally-occurring Cas12e, Cas12d, Cas13, Cas14a, Cas14b, Cas14c, Cas14d, Cas14e, Cas14f, Cas14g, Cas14h, Cas14u, or Cas Φ protein. In some embodiments, the Cas protein is a Cas12e, Cas12d, Cas13, or Cas Φ nickase.

### Flap Endonuclease

[0194] In some embodiments, a prime editor further comprises additional polypeptide components, for example, a flap endonuclease (FEN, e.g., FEN1). In some embodiments, the flap endonuclease excises the 5′ single stranded DNA of the edit strand of the target gene and assists incorporation of the intended nucleotide edit into the target gene. In some embodiments, the FEN is linked or fused to another component. In some embodiments, the FEN is provided in trans, for example, as a separate polypeptide or polynucleotide encoding the FEN.

[0195] In some embodiments, a prime editor or prime editing composition comprises a flap nuclease. In some embodiments, the flap nuclease is a FEN1, or any FEN1 functional variant, functional mutant, or functional fragment thereof. In some embodiments, the flap nuclease is a TREX2, EXO1, or any other flap nuclease known in the art, or any functional variant, functional mutant, or functional fragment thereof. In some embodiments, the flap nuclease has amino acid sequence that is at least about 70% identical, at least about 80% identical, at least about 90% identical, at least about 95% identical, at least about 96% identical, at least about 97% identical, at least about 98% identical, at least about 99% identical, at least about 99.5% identical, or at least about 99.9% identical to any of the flap nucleases described herein or known in the art.

### Nuclear Localization Sequences

[0196] In some embodiments, a prime editor further comprises one or more nuclear localization sequence (NLS). In some embodiments, the NLS helps promote translocation of a protein into the cell nucleus. In some embodiments, a prime editor comprises a fusion protein, e.g., a fusion protein comprising a DNA binding domain and a DNA polymerase, that comprises one or more NLSs. In some embodiments, one or more polypeptides of the prime editor are fused to or linked to one or more NLSs. In some embodiments, the prime editor comprises a DNA binding domain and a DNA polymerase domain that are provided in trans, wherein the DNA binding domain and/or the DNA polymerase domain is fused or linked to one or more NLSs.

[0197] In certain embodiments, a prime editor or prime editing complex comprises at least one NLS. In some embodiments, a prime editor or prime editing complex comprises at least two NLSs. In embodiments with at least two NLSs, the NLSs can be the same NLS, or they can be different NLSs.

[0198] In some instances, a prime editor may further comprise at least one nuclear localization sequence (NLS). In some cases, a prime editor may further comprise 1 NLS. In some cases, a prime editor may further comprise 2 NLSs. In other cases, a prime editor may further comprise 3 NLSs. In one case, a primer editor may further comprise more than 4, 5, 6, 7, 8, 9 or 10 NLSs.

[0199] In addition, the NLSs may be expressed as part of a prime editor complex. In some embodiments, a NLS can be positioned almost anywhere in a protein's amino acid sequence, and generally comprises a short sequence of three or more or four or more amino acids. The location of the NLS fusion can be at the N-terminus, the C-terminus, or positioned anywhere within a sequence of a prime editor or a component thereof (e.g., inserted between the DNA-binding domain and the DNA polymerase domain of a prime editor fusion protein, between the DNA binding domain and a linker sequence, between a DNA polymerase and a linker sequence, between two linker sequences of a prime editor fusion protein or a component thereof, in either N-terminus to C-terminus or C-terminus to N-terminus order). In some embodiments, a prime editor is fusion protein that comprises an NLS at the N terminus. In some embodiments, a prime editor is fusion protein that comprises an NLS at the C terminus. In some embodiments, a prime editor is fusion protein that comprises at least one NLS at both the N terminus and the C terminus. In some embodiments, the prime editor is a fusion protein that comprises two NLSs at the N terminus and/or the C terminus.

[0200] Any NLSs that are known in the art are also contemplated herein. The NLSs may be any naturally occurring NLS, or any non-naturally occurring NLS (e.g., an NLS with one or more mutations relative to a wild-type NLS). In some embodiments, the one or more NLSs of a prime editor comprise bipartite NLSs. In some embodiments, a nuclear localization signal (NLS) is predominantly basic. In some embodiments, the one or more NLSs of a prime editor are rich in lysine and arginine residues. In some embodiments, the one or more NLSs of a prime editor comprise proline residues. In some embodiments, a nuclear localization signal (NLS) comprises the sequence MDSLLMNRRKFLYQFKNVRWAKGRRETYLC (SEQ ID NO: 7), KRTADGSEFESPKKKRKV (SEQ ID NO: 8), KRTADGSEFEPKKKRKV (SEQ ID NO: 9), NLSKRPAAIKKAGQAKKKK (SEQ ID NO: 10), RQRRNELKRSF (SEQ ID NO: 11), or NQSSNFGPMKGGNFGGRSSGPYGGGGQYFAKPRNQGGY (SEQ ID NO: 12).

[0201] In some embodiments, a NLS is a monopartite NLS. For example, in some embodiments, a NLS is a SV40 large T antigen NLS PKKKRKV (SEQ ID NO: 13). In some embodiments, a NLS is a bipartite NLS. In some embodiments, a bipartite NLS comprises two basic domains separated by a spacer sequence comprising a variable number of amino acids. In some embodiments, a NLS is a bipartite NLS. In some embodiments, a bipartite NLS consists of two basic domains separated by a spacer sequence comprising a variable number of amino acids. In some embodiments, the spacer amino acid sequence comprises the sequence KRXXX XXXXXXXKKKL (Xenopus nucleoplasmin NLS) (SEQ ID NO: 14), wherein X is any amino acid. In some embodiments, the NLS comprises a nucleoplasmin NLS sequence KRPAATKKAGQAKKKK (SEQ ID NO: 15). In some embodiments, a NLS is a noncanonical sequences such as M9 of the hnRNP A1 protein, the influenza virus nucleoprotein NLS, and the yeast Gal4 protein NLS. In some embodiments, a NLS is a noncanonical sequences such as M9 of the hnRNP A1 protein, the influenza virus nucleoprotein NLS, and the yeast Gal4 protein NLS.

[0202] Other non-limiting examples of NLS sequences are provided in Table 3 below.

TABLE 3
Exemplary nuclear localization sequences

| | | SEQ |
|---|---|---|
| | | ID |
| Description | Sequence | NO: |
| NLS of SV40 | PKKKRKV | 16 |
| Large T-AG | | |
| NLS | MKRTADGSEFESPKKKRKV | 17 |
| NLS | MDSLLMNRRKFLYQFKNVRWAKGRRETYLC | 7 |
| NLS of | AVKRPAATKKAGQAKKKKLD | 18 |
| Nucleoplasmin | | |
| NLS of EGL- | MSRRRKANPTKLSENAKKLAKEVEN | 19 |
| 13 | | |
| NLS of C-Myc | PAAKRVKLD | 20 |
| NLS of Tus- | KLKIKRPVK | 21 |
| protein | | |
| NLS of | VSRKRPRP | 22 |
| polyoma large | | |
| T-AG | | |
| NLS of | EGAPPAKRAR | 23 |
| Hepatitis D | | |
| virus antigen | | |
| NLS of murine | PPQPKKKPLDGE | 24 |
| p53 | | |
| NLS of PE1 | SGGSKRTADGSEFEPKKKRKV | 25 |
| and PE2 | | |
| NLS | KRTADGSEFESPKKKRKV | 6021 |
| NLS | KRTADGSEFEPKKKRKV | 6022 |
| NLS | NLSKRPAAIKKAGQAKKKK | 6023 |
| NLS | RQRRNELKRSF | 6024 |
| NLS | NQSSNFGPMKGGNFGGRSSGPYGGGGQYFAKPRNQGGY | 6025 |
| NLS of | KRXXXXXXXXXXKKKL | 6026 |
| Xenopus | | |
| nucleoplasmin | | |
| NLS of | KRPAATKKAGQAKKKK | 6027 |
| Xenopus | | |
| nucleoplasmin | | |
| NLS | SGGSSGGSKRTADGSEFESPKKKRKVSGGSSGGS | 6028 |
| NLS | SGGSKRTADGSEFESPKKKRKV | 6029 |
| NLS | GSGPAAKRVKLD | 6030 |

### Additional Prime Editor Components

[0203] A prime editor described herein may comprise additional functional domains, for example, one or more domains that modify the folding, solubility, or charge of the prime editor. In some instances, the prime editor may comprise a solubility-enhancement (SET) domain.

[0204] In some embodiments, a split intein comprises two halves of an intein protein, which may be referred to as a N-terminal half of an intein, or intein-N, and a C-terminal half of an intein, or intein-C, respectively. In some embodiments, the intein-N and the intein-C may each be fused to a protein domain (the N-terminal and the C-terminal exteins). The exteins can be any protein or polypeptides, for example, any prime editor polypeptide component. In some embodiments, the intein-N and intein-C of a split intein can associate non-covalently to form an active intein and catalyze a-trans splicing reaction. In some embodiments, the trans splicing reaction excises the two intein sequences and links the two extein sequences with a peptide bond. As a result, the intein-N and the intein-C are spliced out, and a protein domain linked to the intein-N is fused to a protein domain linked to the intein-C. essentially in same way as a contiguous intein does. In some embodiments, a split-intein is derived from a eukaryotic intein, a bacterial intein, or an archaeal intein. Preferably, the split intein so-derived will possess only the amino acid sequences essential for catalyzing trans-splicing reactions. In some embodiments, an intein-N or an intein-C further comprise one or more amino acid substitutions as compared to a wild type intein-N or wild type intein-C, for example, amino acid substitutions that enhances the trans-splicing activity of the split intein. In some embodiments, the intein-C comprises 4 to 7 contiguous amino acid residues, wherein at least 4 amino acids of which are from the last β-strand of the intein from which it was derived. In some embodiments, the split intein is derived from a Ssp DnaE intein, e.g., Synechocytis sp. PCC6803, or any intein or split intein known in the art, or any functional variants or fragments thereof.

[0205] In some embodiments, a prime editor comprises one or more epitope tags. Non-limiting examples of epitope tags include histidine (His) tags, V5 tags, FLAG tags, influenza hemagglutinin (HA) tags, Myc tags, VSV-G tags, thioredoxin (Trx) tags, biotin carboxylase carrier protein (BCCP) tags, myc-tags, calmodulin-tags, polyhistidine tags, also referred to as histidine tags or His-tags, maltose binding protein (MBP)-tags, nus-tags, glutathione-S-transferase (GST)-tags, green fluorescent protein (GFP)-tags, thioredoxin-tags, S-tags, Softags (e.g., Softag 1, Softag 3), strep-tags, biotin ligase tags, FlAsH tags, V5 tags, and SBP-tags. Additional suitable sequences will be apparent to those of skill in the art. In some embodiments, the fusion protein comprises one or more His tags.

[0206] In some embodiments, a prime editor comprises one or more polypeptide domains encoded by one or more reporter genes. Examples of reporter genes include, but are not limited to, glutathione-5-transferase (GST), horseradish peroxidase (HRP), chloramphenicol acetyltransferase (CAT), beta-galactosidase, beta-glucuronidase, luciferase, green fluorescent protein (GFP), HcRed, DsRed, cyan fluorescent protein (CFP), yellow fluorescent protein (YFP), and autofluorescent proteins including blue fluorescent protein (BFP).

[0207] In some embodiments, a prime editor comprises one or more polypeptide domains that binds DNA molecules or binds other cellular molecules. Examples of binding proteins or domains include, but are not limited to, maltose binding protein (MBP), S-tag, Lex A DNA binding domain (DBD) fusions, GAL4 DNA binding domain fusions, and herpes simplex virus (HSV) BP16 protein fusions.

[0208] In some embodiments, a prime editor comprises a protein domain that is capable of modifying the intracellular half-life of the prime editor.

[0209] In some embodiments, a prime editing complex comprises a fusion protein comprising a DNA binding domain (e.g., Cas9 (H840A)) and a reverse transcriptase (e.g., a variant MMLV RT) having the following structure: [NLS]—[Cas9 (H840A)]—[linker]—[MMLV_RT(D200N)(T330P)(L603W)(T306K)(W313F)], and a desired PEgRNA. In some embodiments, the prime editing complex comprises a prime editor fusion protein that has the amino acid sequence of SEQ ID NO: 53.

[0210] Polypeptides comprising components of a prime editor may be fused via peptide linkers, or may be provided in trans relevant to each other. For example, a reverse transcriptase may be expressed, delivered, or otherwise provided as an individual component rather than as a part of a fusion protein with the DNA binding domain. In such cases, components of the prime editor may be associated through non-peptide linkages or co-localization functions. In some embodiments, a prime editor further comprises additional components capable of interacting with, associating with, or capable of recruiting other components of the prime editor or the prime editing system. For example, a prime editor may comprise an RNA-protein recruitment polypeptide that can associate with an RNA-protein recruitment RNA aptamer. In some embodiments, an RNA-protein recruitment polypeptide can recruit, or be recruited by, a specific RNA sequence. Non limiting examples of RNA-protein recruitment polypeptide and RNA aptamer pairs include a MS2 coat protein and a MS2 RNA hairpin, a PCP polypeptide and a PP7 RNA hairpin, a Com polypeptide and a Com RNA hairpin, a Ku protein and a telomerase Ku binding RNA motif, and a Sm7 protein and a telomerase Sm7 binding RNA motif. In some embodiments, the prime editor comprises a DNA binding domain fused or linked to an RNA-protein recruitment polypeptide. In some embodiments, the prime editor comprises a DNA polymerase domain fused or linked to an RNA-protein recruitment polypeptide. In some embodiments, the DNA binding domain and the DNA polymerase domain fused to the RNA-protein recruitment polypeptide, or the DNA binding domain fused to the RNA-protein recruitment polypeptide and the DNA polymerase domain are co-localized by the corresponding RNA-protein recruitment RNA aptamer of the RNA-protein recruitment polypeptide. In some embodiments, the corresponding RNA-protein recruitment RNA aptamer fused or linked to a portion of the PEgRNA or ngRNA. For example, an MS2 coat protein fused or linked to the DNA polymerase and a MS2 hairpin installed on the PEgRNA for co-localization of the DNA polymerase and the RNA-guided DNA binding domain (e.g., a Cas9 nickase).

[0211] In some embodiments, a prime editor comprises a polypeptide domain, an MS2 coat protein (MCP), that recognizes an MS2 hairpin. In some embodiments, the nucleotide sequence of the MS2 hairpin (or equivalently referred to as the “MS2 aptamer”) is: GCCAACATGAGGATCACCCATGTCTGCAGGGCC (SEQ ID NO: 26). In some embodiments, the amino acid sequence of the MCP is:

(SEQ ID NO: 27)
GSASNFTQFVLVDNGGTGDVTVAPSNFANGVAEWISSNSRSQAYKVTCS
VRQSSAQNRKYTIKVEVPKVATQTVGGEELPVAGWRSYLNMELTIPIFA
TNSDCELIVKAMQGLLKDGNPIPSAIAANSGIY.

[0212] In certain embodiments, components of a prime editor are directly fused to each other. In certain embodiments, components of a prime editor are associated to each other via a linker.

[0213] As used herein, a linker can be any chemical group or a molecule linking two molecules or moieties, e.g., a DNA binding domain and a polymerase domain of a prime editor. In some embodiments, a linker is an organic molecule, group, polymer, or chemical moiety. In some embodiments, the linker comprises a non-peptide moiety. The linker may be as simple as a covalent bond, or it may be a polymeric linker many atoms in length, for example, a polynucleotide sequence. In certain embodiments, the linker is a covalent bond (e.g., a carbon-carbon bond, disulfide bond, carbon-heteroatom bond, etc.).

[0214] In certain embodiments, two or more components of a prime editor are linked to each other by a peptide linker. In some embodiments, a peptide linker is 5-100 amino acids in length, for example, 2, 3, 4, 5, 6, 7, 8, 9, 10, 11, 12, 13, 14, 15, 16, 17, 18, 19, 20, 21, 22, 23, 24, 25, 26, 27, 28, 29, 30, 30-35, 35-40, 40-45, 45-50, 50-60, 60-70, 70-80, 80-90, 90-100, 100-150, or 150-200 amino acids in length. In some embodiments, the peptide linker is 16 amino acids in length, 24 amino acids in length, 64 amino acids in length, or 96 amino acids in length.

[0215] In some embodiments, the linker comprises the amino acid sequence (GGGGS)n (SEQ ID NO: 28), (G)n (SEQ ID NO: 29), (EAAAK)n (SEQ ID NO: 30), (GGS)n (SEQ ID NO: 31), (SGGS)n (SEQ ID NO: 32), (XP)n (SEQ ID NO: 33), or any combination thereof, wherein n is independently an integer between 1 and 30, and wherein X is any amino acid. In some embodiments, the linker comprises the amino acid sequence (GGS)n (SEQ ID NO: 34), wherein n is 1, 3, or 7. In some embodiments, the linker comprises the amino acid sequence SGSETPGTSESATPES (SEQ ID NO: 35). In some embodiments, the linker comprises the amino acid sequence SGGSSGGSSGS ETPGTSESATPESSGGSSGGS (SEQ ID NO: 36). In some embodiments, the linker comprises the amino acid sequence SGGSGGSGGS (SEQ ID NO: 37). In some embodiments, the linker comprises the amino acid sequence SGGS (SEQ ID NO: 38). In other embodiments, the linker comprises the amino acid sequence

(SEQ ID NO: 39)
SGGSSGGSSGSETPGTSESATPESAGSYPYDVPDYAGSAAPAAKKKKLD
GSGSGGSSGGS.

[0216] In some embodiments, a linker comprises 1-100 amino acids. In some embodiments, the linker comprises the amino acid sequence SGSETPGTSESATPES (SEQ ID NO: 40). In some embodiments, the linker comprises the amino acid sequence SGGSSGGSSGSETPGTSESATPESSGGSSGGS (SEQ ID NO: 41). In some embodiments, the linker comprises the amino acid sequence SGGSGGSGGS (SEQ ID NO: 42). In some embodiments, the linker comprises the amino acid sequence SGGS (SEQ ID NO: 43). In some embodiments, the linker comprises the amino acid sequence GGSGGS (SEQ ID NO: 44), GGSGGSGGS (SEQ ID NO: 45), SGGSSGGSSGSETPGTSESATPESAGSYPYDVPDYAGSAAPAAKKKKLDGSGSGGSSG GS (SEQ ID NO: 46), or SGGSSGGSSGSETPGTSESATPESSGGSSGGSS (SEQ ID NO: 47).

[0217] In certain embodiments, two or more components of a prime editor are linked to each other by a non-peptide linker. In some embodiments, the linker is a carbon-nitrogen bond of an amide linkage. In certain embodiments, the linker is a cyclic or acyclic, substituted or unsubstituted, branched or unbranched aliphatic or heteroaliphatic linker. In certain embodiments, the linker is polymeric (e.g., polyethylene, polyethylene glycol, polyamide, polyester, etc.). In certain embodiments, the linker comprises a monomer, dimer, or polymer of aminoalkanoic acid. In certain embodiments, the linker comprises an aminoalkanoic acid (e.g., glycine, ethanoic acid, alanine, beta-alanine, 3-aminopropanoic acid, 4-aminobutanoic acid, 5-pentanoic acid, etc.). In certain embodiments, the linker comprises a monomer, dimer, or polymer of aminohexanoic acid (Ahx). In certain embodiments, the linker is based on a carbocyclic moiety (e.g., cyclopentane, cyclohexane). In other embodiments, the linker comprises a polyethylene glycol moiety (PEG). In certain embodiments, the linker comprises an aryl or heteroaryl moiety. In certain embodiments, the linker is based on a phenyl ring.

[0218] The linker may include functionalized moieties to facilitate attachment of a nucleophile (e.g., thiol, amino) from the peptide to the linker. Any electrophile may be used as part of the linker. Exemplary electrophiles include, but are not limited to, activated esters, activated amides, Michael acceptors, alkyl halides, aryl halides, acyl halides, and isothiocyanates.

[0219] Components of a prime editor may be connected to each other in any order. In some embodiments, the DNA binding domain and the DNA polymerase domain of a prime editor may be fused to form a fusion protein, or may be joined by a peptide or protein linker, in any order from the N terminus to the C terminus. In some embodiments, a prime editor comprises a DNA binding domain fused or linked to the C-terminal end of a DNA polymerase domain. In some embodiments, a prime editor comprises a DNA binding domain fused or linked to the N-terminal end of a DNA polymerase domain. In some embodiments, the prime editor comprises a fusion protein comprising the structure NH2—[DNA binding domain]—[polymerase]—COOH; or NH2—[polymerase]—[DNA binding domain]—COOH, wherein each instance of “]—[” indicates the presence of an optional linker sequence. In some embodiments, a prime editor comprises a fusion protein and a DNA polymerase domain provided in trans, wherein the fusion protein comprises the structure NH2—[DNA binding domain]—[RNA-protein recruitment polypeptide]—COOH. In some embodiments, a prime editor comprises a fusion protein and a DNA binding domain provided in trans, wherein the fusion protein comprises the structure NH2—[DNA polymerase domain]—[RNA-protein recruitment polypeptide]—COOH.

[0220] In some embodiments, a prime editor fusion protein, a polypeptide component of a prime editor, or a polynucleotide encoding the prime editor fusion protein or polypeptide component, may be split into an N-terminal half and a C-terminal half or polypeptides that encode the N-terminal half and the C terminal half, and provided to a target DNA in a cell separately. For example, in certain embodiments, a prime editor fusion protein may be split into a N-terminal and a C-terminal half for separate delivery in AAV vectors, and subsequently translated and colocalized in a target cell to reform the complete polypeptide or prime editor protein. In such cases, separate halves of a protein or a fusion protein may each comprise a split-intein to facilitate colocalization and reformation of the complete protein or fusion protein by the mechanism of intein facilitated trans splicing. In some embodiments, a prime editor comprises a N-terminal half fused to an intein-N, and a C-terminal half fused to an intein-C, or polynucleotides or vectors (e.g., AAV vectors) encoding each thereof. When delivered and/or expressed in a target cell, the intein-N and the intein-C can be excised via protein trans-splicing, resulting in a complete prime editor fusion protein in the target cell.

[0221] In some embodiments, a prime editor fusion protein comprises a Cas9 (H840A) nickase and a wild type M-MLV RT (referred to as “PE1”, and a prime editing system or composition referred to as PE1 system or PE1 composition). In some embodiments, a prime editor fusion protein comprises one or more individual components of PE1. In some embodiments, a prime editor fusion protein comprises a Cas9 (H840A) nickase and a M-MLV RT that has amino acid substitutions D200N, T330P, T306K, W313F, and L603W compared to a wild type M-MLV RT (the fusion protein referred to as “PE2”, and a prime editing system or composition referred to as PE2 system or PE2 composition). The amino acid sequence of an exemplary PE2 and its individual components in shown in Table 4. In some embodiments, a prime editor fusion protein is PE2. In some embodiments, a prime editor fusion protein comprises one or more individual components of PE2. In some embodiments, a prime editor fusion protein comprises a Cas9 (R221K, N349K, H840A) nickase and a M-MLV RT that has amino acid substitutions D200N, T330P, T306K, W313F, and L603W compared to a wild type M-MLV RT (the fusion protein referred to as “PEmax”, and a prime editing system or composition referred to as PEmax system or PEmax composition). The amino acid sequence of an exemplary PEmax and its individual components in shown in Table 4B. In some embodiments, a prime editor fusion protein is PEmax. In some embodiments, a prime editor fusion protein comprises one or more individual components of PEmax.

[0222] In various embodiments, a prime editor fusion proteins comprises an amino acid sequence that is at least about 70% identical, at least about 80% identical, at least about 90% identical, at least about 95% identical, at least about 96% identical, at least about 97% identical, at least about 98% identical, at least about 99% identical, at least about 99.5% identical, or at least about 99.9% identical to PE1, PE2, or any of the prime editor fusion sequences described herein or known in the art.

TABLE 4
Amino acid sequence of PE2 and its individual components

| DESCRIPTION | SEQUENCE |
|---|---|
| PE2 fusion | MKRTADGSEFESPKKKRKVDKKYSIGLDIGTNSVGWAVITDEYKVPSKKFKVLGNTDRHSIKKNL |
| protein | IGALLFDSGETAEATRLKRTARRRYTRRKNRICYLQEIFSNEMAKVDDSFFHRLEESFLVEEDKK |
| CAS9(H840A)- | HERHPIFGNIVDEVAYHEKYPTIYHLRKKLVDSTDKADLRLIYLALAHMIKFRGHFLIEGDLNPDN |
| MMLV_RT | SDVDKLFIQLVQTYNQLFEENPINASGVDAKAILSARLSKSRRLENLIAQLPGEKKNGLFGNLIAL |
| D200N T330P | SLGLTPNFKSNFDLAEDAKLQLSKDTYDDDLDNLLAQIGDQYADLFLAAKNLSDAILLSDILRVN |
| L603W T306K | TEITKAPLSASMIKRYDEHHQDLTLLKALVRQQLPEKYKEIFFDQSKNGYAGYIDGGASQEEFYK |
| W313F (SEQ ID | FIKPILEKMDGTEELLVKLNREDLLRKQRTFDNGSIPHQIHLGELHAILRRQEDFYPFLKDNREKI |
| NO: 53) | EKILTFRIPYYVGPLARGNSRFAWMTRKSEETITPWNFEEVVDKGASAQSFIERMTNFDKNLPNE |
| | KVLPKHSLLYEYFTVYNELTKVKYVTEGMRKPAFLSGEQKKAIVDLLFKTNRKVTVKQLKEDYF |
| | KKIECFDSVEISGVEDRFNASLGTYHDLLKIIKDKDFLDNEENEDILEDIVLTLTLFEDREMIEERLK |
| | TYAHLFDDKVMKQLKRRRYTGWGRLSRKLINGIRDKQSGKTILDFLKSDGFANRNFMQLIHDDS |
| | LTFKEDIQKAQVSGQGDSLHEHIANLAGSPAIKKGILQTVKVVDELVKVMGRHKPENIVIEMARE |
| | NQTTQKGQKNSRERMKRIEEGIKELGSQILKEHPVENTQLQNEKLYLYYLQNGRDMYVDQELDI |
| | NRLSDYDVDAIVPQSFLKDDSIDNKVLTRSDKNRGKSDNVPSEEVVKKMKNYWRQLLNAKLITQ |
| | RKFDNLTKAERGGLSELDKAGFIKRQLVETRQITKHVAQILDSRMNTKYDENDKLIREVKVITLK |
| | SKLVSDFRKDFQFYKVREINNYHHAHDAYLNAVVGTALIKKYPKLESEFVYGDYKVYDVRKMIA |
| | KSEQEIGKATAKYFFYSNIMNFFKTEITLANGEIRKRPLIETNGETGEIVWDKGRDFATVRKVLSM |
| | PQVNIVKKTEVQTGGFSKESILPKRNSDKLIARKKDWDPKKYGGFDSPTVAYSVLVVAKVEKGK |
| | SKKLKSVKELLGITIMERSSFEKNPIDFLEAKGYKEVKKDLIIKLPKYSLFELENGRKRMLASAGE |
| | LQKGNELALPSKYVNFLYLASHYEKLKGSPEDNEQKQLFVEQHKHYLDEIIEQISEFSKRVILAD |
| | ANLDKVLSAYNKHRDKPIREQAENIIHLFTLTNLGAPAAFKYFDTTIDRKRYTSTKEVLDATLIHQ |
| | SITGLYETRIDLSQLGGDSGGSSGGSSGSETPGTSESATPESSGGSSGGSSTLNIEDEYRLHETS |
| | KEPDVSLGSTWLSDFPQAWAETGGMGLAVRQAPLIIPLKATSTPVSIKQYPMSQEARLGIKPHIQR |
| | LLDQGILVPCQSPWNTPLLPVKKPGTNDYRPVQDLREVNKRVEDIHPTVPNPYNLLSGLPPSHQW |
| | YTVLDLKDAFFCLRLHPTSQPLFAFEWRDPEMGISGQLTWTRLPQGFKNSPTLFNEALHRDLADF |
| | RIQHPDLILLQYVDDLLLAATSELDCQQGTRALLQTLGNLGYRASAKKAQICQKQVKYLGYLLKEG |
| | QRWLTEARKETVMGQPTPKTPRQLREFLGKAGFCRLFIPGFAEMAAPLYPLTKPGTLFNWGPDQ |
| | QKAYQEIKQALLTAPALGLPDLTKPFELFVDEKQGYAKGVLTQKLGPWRRPVAYLSKKLDPVAAG |
| | WPPCLRMVAAIAVLTKDAGKLTMGQPLVILAPHAVEALVKQPPDRWLSNARMTHYQALLLDTDRV |
| | QFGPVVALNPATLLPLPEEGLQHNCLDILAEAHGTRPDLTDQPLPDADHTWYTDGSSLLQEGQRK |
| | AGAAVTTETEVIWAKALPAGTSAQRAELIALTQALKMAEGKKLNVYTDSRYAFATAHIHGEIYRRR |
| | GWLTSEGKEIKNKDEILALLKALFLPKRLSIIHCPGHQKGHSAEARGNRMADQAARKAAITETPDT |
| | STLLIENSSPSGGSKRTADGSEFEPKKKRKV |
| | KEY: |
| | NUCLEAR LOCALIZATION SEQUENCE (NLS) |
| | CAS9(H840A) |
| | 33-AMINO ACID LINKER |
| | M-MLV REVERSE TRANSCRIPTASE |
| PE2-N-terminal | MKRTADGSEFESPKKKRKV |
| NLS (SEQ ID | |
| NO: 17) | |
| PE2-CAS9 | DKKYSIGLDIGTNSVGWAVITDEYKVPSKKFKVLGNTDRHSIKKNLIGALLFDSGETAEATRLKRTA |
| (H840A) (MET | RRRYTRRKNRICYLQEIFSNEMAKVDDSFFHRLEESFLVEEDKKHERHPIFGNIVDEVAYHEKYPTI |
| MINUS) (SEQ ID | YHLRKKLVDSTDKADLRLIYLALAHMIKFRGHFLIEGDLNPDNSDVDKLFIQLVQTYNQLFEENPINA |
| NO: 58) | SGVDAKAILSARLSKSRRLENLIAQLPGEKKNGLFGNLIALSLGLTPNFKSNFDLAEDAKLQLSKDT |
| | YDDDLDNLLAQIGDQYADLFLAAKNLSDAILLSDILRVNTEITKAPLSASMIKRYDEHHQDLTLLKAL |
| | VRQQLPEKYKEIFFDQSKNGYAGYIDGGASQEEFYKFIKPILEKMDGTEELLVKLNREDLLRKQRT |
| | FDNGSIPHQIHLGELHAILRRQEDFYPFLKDNREKIEKILTFRIPYYVGPLARGNSRFAWMTRKSEE |
| | TITPWNFEEVVDKGASAQSFIERMTNFDKNLPNEKVLPKHSLLYEYFTVYNELTKVKYVTEGMRK |
| | PAFLSGEQKKAIVDLLFKTNRKVTVKQLKEDYFKKIECFDSVEISGVEDRFNASLGTYHDLLKIIKDK |
| | DFLDNEENEDILEDIVLTLTLFEDREMIEERLKTYAHLFDDKVMKQLKRRRYTGWGRLSRKLINGIR |
| | DKQSGKTILDFLKSDGFANRNFMQLIHDDSLTFKEDIQKAQVSGQGDSLHEHIANLAGSPAIKKGIL |
| | QTVKVVDELVKVMGRHKPENIVIEMARENQTTQKGQKNSRERMKRIEEGIKELGSQILKEHPVEN |
| | TQLQNEKLYLYYLQNGRDMYVDQELDINRLSDYDVDAIVPQSFLKDDSIDNKVLTRSDKNRGKSD |
| | NVPSEEVVKKMKNYWRQLLNAKLITQRKFDNLTKAERGGLSELDKAGFIKRQLVETRQITKHVAQI |
| | LDSRMNTKYDENDKLIREVKVITLKSKLVSDFRKDFQFYKVREINNYHHAHDAYLNAVVGTALIKKY |
| | PKLESEFVYGDYKVYDVRKMIAKSEQEIGKATAKYFFYSNIMNFFKTEITLANGEIRKRPLIETNGET |
| | GEIVWDKGRDFATVRKVLSMPQVNIVKKTEVQTGGFSKESILPKRNSDKLIARKKDWDPKKYGGF |
| | DSPTVAYSVLWVAKVEKGKSKKLKSVKELLGITIMERSSFEKNPIDFLEAKGYKEVKKDLIIKLPKYS |
| | LFELENGRKRMLASAGELQKGNELALPSKYVNFLYLASHYEKLKGSPEDNEQKQLFVEQHKHYL |
| | DEIIEQISEFSKRVILADANLDKVLSAYNKHRDKPIREQAENIIHLFTLTNLGAPAAFKYFDTTIDRKR |
| | YTSTKEVLDATLIHQSITGLYETRIDLSQLGGD |
| PE2-linker | SGGSSGGSSGSETPGTSESATPESSGGSSGGSS |
| between CAS9 | |
| domain and RT | |
| domain (33 | |
| amino acids) | |
| (SEQ ID NO: 59) | |
| PE2-MMLV_RT | TLNIEDEYRLHETSKEPDVSLGSTWLSDFPQAWAETGGMGLAVRQAPLIIPLKATSTPVSIKQYPM |
| D200N T330P | SQEARLGIKPHIQRLLDQGILVPCQSPWNTPLLPVKKPGTNDYRPVQDLREVNKRVEDIHPTVPNP |
| L603W T306K | YNLLSGLPPSHQWYTVLDLKDAFFCLRLHPTSQPLFAFEWRDPEMGISGQLTWTRLPQGFKNSP |
| W313F (SEQ ID | TLFNEALHRDLADFRIQHPDLILLQYVDDLLLAATSELDCQQGTRALLQTLGNLGYRASAKKAQIC |
| NO: 49) | QKQVKYLGYLLKEGQRWLTEARKETVMGQPTPKTPRQLREFLGKAGFCRLFIPGFAEMAAPLYP |
| | LTKPGTLFNWGPDQQKAYQEIKQALLTAPALGLPDLTKPFELFVDEKQGYAKGVLTQKLGPWRR |
| | PVAYLSKKLDPVAAGWPPCLRMVAAIAVLTKDAGKLTMGQPLVILAPHAVEALVKQPPDRWLSNA |
| | RMTHYQALLLDTDRVQFGPVVALNPATLLPLPEEGLQHNCLDILAEAHGTRPDLTDQPLPDADHT |
| | WYTDGSSLLQEGQRKAGAAVTTETEVIWAKALPAGTSAQRAELIALTQALKMAEGKKLNVYTDSR |
| | YAFATAHIHGEIYRRRGWLTSEGKEIKNKDEILALLKALFLPKRLSIIHCPGHQKGHSAEARGNRMA |
| | DQAARKAAITETPDTSTLLIENSSP |
| PE2-C-terminal | SGGSKRTADGSEFEPKKKRKV |
| NLS (SEQ ID | |
| NO: 25) | |

TABLE 4B
Amino acid sequence of PEmax and its individual components

| DESCRIPTION | SEQUENCE |
|---|---|
| PEmax fusion | MKRTADGSEFESPKKKRKVDKKYSIGLDIGTNSVGWAVITDEYKVPSKKFKVLG |
| protein (SEQ | NTDRHSIKKNLIGALLFDSGETAEATRLKRTARRRYTRRKNRICYLQEIFSNEMA |
| ID NO: 6031) | KVDDSFFHRLEESFLVEEDKKHERHPIFGNIVDEVAYHEKYPTIYHLRKKLVDST |
| | DKADLRLIYLALAHMIKFRGHFLIEGDLNPDNSDVDKLFIQLVQTYNQLFEENPI |
| | NASGVDAKAILSARLSKSRKLENLIAQLPGEKKNGLFGNLIALSLGLTPNFKSNF |
| | DLAEDAKLQLSKDTYDDDLDNLLAQIGDQYADLFLAAKNLSDAILLSDILRVNT |
| | EITKAPLSASMIKRYDEHHQDLTLLKALVRQQLPEKYKEIFFDQSKNGYAGYIDG |
| | GASQEEFYKFIKPILEKMDGTEELLVKLKREDLLRKQRTFDNGSIPHQIHLGELH |
| | AILRRQEDFYPFLKDNREKIEKILTFRIPYYVGPLARGNSRFAWMTRKSEETITPW |
| | NFEEVVDKGASAQSFIERMTNFDKNLPNEKVLPKHSLLYEYFTVYNELTKVKYV |
| | TEGMRKPAFLSGEQKKAIVDLLFKTNRKVTVKQLKEDYFKKIECFDSVEISGVE |
| | DRFNASLGTYHDLLKIIKDKDFLDNEENEDILEDIVLTLTLFEDREMIEERLKTYA |
| | HLFDDKVMKQLKRRRYTGWGRLSRKLINGIRDKQSGKTILDFLKSDGFANRNF |
| | MQLIHDDSLTFKEDIQKAQVSGQGDSLHEHIANLAGSPAIKKGILQTVKVVDELV |
| | KVMGRHKPENIVIEMARENQTTQKGQKNSRERMKRIEEGIKELGSQILKEHPVE |
| | NTQLQNEKLYLYYLQNGRDMYVDQELDINRLSDYDVDAIVPQSFLKDDSIDNK |
| | VLTRSDKNRGKSDNVPSEEVVKKMKNYWRQLLNAKLITQRKFDNLTKAERGG |
| | LSELDKAGFIKRQLVETRQITKHVAQILDSRMNTKYDENDKLIREVKVITLKSKL |
| | VSDFRKDFQFYKVREINNYHHAHDAYLNAVVGTALIKKYPKLESEFVYGDYKV |
| | YDVRKMIAKSEQEIGKATAKYFFYSNIMNFFKTEITLANGEIRKRPLIETNGETGE |
| | IVWDKGRDFATVRKVLSMPQVNIVKKTEVQTGGFSKESILPKRNSDKLIARKKD |
| | WDPKKYGGFDSPTVAYSVLVVAKVEKGKSKKLKSVKELLGITIMERSSFEKNPI |
| | DFLEAKGYKEVKKDLIIKLPKYSLFELENGRKRMLASAGELQKGNELALPSKYV |
| | NFLYLASHYEKLKGSPEDNEQKQLFVEQHKHYLDEIIEQISEFSKRVILADANLD |
| | KVLSAYNKHRDKPIREQAENIIHLFTLTNLGAPAAFKYFDTTIDRKRYTSTKEVL |
| | DATLIHQSITGLYETRIDLSQLGGDSGGSSGGSKRTADGSEFESPKKKRKVSGGSS |
| | GGSTLNIEDEYRLHETSKEPDVSLGSTWLSDFPQAWAETGGMGLAVRQAPLIIPL |
| | KATSTPVSIKQYPMSQEARLGIKPHIQRLLDQGILVPCQSPWNTPLLPVKKPGTN |
| | DYRPVQDLREVNKRVEDIHPTVPNPYNLLSGLPPSHQWYTVLDLKDAFFCLRLH |
| | PTSQPLFAFEWRDPEMGISGQLTWTRLPQGFKNSPTLFNEALHRDLADFRIQHPD |
| | LILLQYVDDLLLAATSELDCQQGTRALLQTLGNLGYRASAKKAQICQKQVKYL |
| | GYLLKEGQRWLTEARKETVMGQPTPKTPRQLREFLGKAGFCRLFIPGFAEMAAP |
| | LYPLTKPGTLFNWGPDQQKAYQEIKQALLTAPALGLPDLTKPFELFVDEKQGYA |
| | KGVLTQKLGPWRRPVAYLSKKLDPVAAGWPPCLRMVAAIAVLTKDAGKLTMG |
| | QPLVILAPHAVEALVKQPPDRWLSNARMTHYQALLLDTDRVQFGPVVALNPAT |
| | LLPLPEEGLQHNCLDILAEAHGTRPDLTDQPLPDADHTWYTDGSSLLQEGQRKA |
| | GAAVTTETEVIWAKALPAGTSAQRAELIALTQALKMAEGKKLNVYTDSRYAFA |
| | TAHIHGEIYRRRGWLTSEGKEIKNKDEILALLKALFLPKRLSIIHCPGHQKGHSAE |
| | ARGNRMADQAARKAAITETPDTSTLLIENSSPSGGSKRTADGSEFESPKKKRKV |
| | GSGPAAKRVKLD |
| PEmax-N- | MKRTADGSEFESPKKKRKV |
| terminal NLS | |
| (SEQ ID NO: | |
| 6032) | |
| PEmax-CAS9 | DKKYSIGLDIGTNSVGWAVITDEYKVPSKKFKVLGNTDRHSIKKNLIGALLFDSG |
| (R221K N394K | ETAEATRLKRTARRRYTRRKNRICYLQEIFSNEMAKVDDSFFHRLEESFLVEEDK |
| H840A) (not | KHERHPIFGNIVDEVAYHEKYPTIYHLRKKLVDSTDKADLRLIYLALAHMIKFRG |
| including N- | HFLIEGDLNPDNSDVDKLFIQLVQTYNQLFEENPINASGVDAKAILSARLSKSRK |
| terminal Met in | LENLIAQLPGEKKNGLFGNLIALSLGLTPNFKSNFDLAEDAKLQLSKDTYDDDLD |
| Cas9) (SEQ ID | NLLAQIGDQYADLFLAAKNLSDAILLSDILRVNTEITKAPLSASMIKRYDEHHQD |
| NO: 6033) | LTLLKALVRQQLPEKYKEIFFDQSKNGYAGYIDGGASQEEFYKFIKPILEKMDGT |
| | EELLVKLKREDLLRKQRTFDNGSIPHQIHLGELHAILRRQEDFYPFLKDNREKIEK |
| | ILTFRIPYYVGPLARGNSRFAWMTRKSEETITPWNFEEVVDKGASAQSFIERMTN |
| | FDKNLPNEKVLPKHSLLYEYFTVYNELTKVKYVTEGMRKPAFLSGEQKKAIVDL |
| | LFKTNRKVTVKQLKEDYFKKIECFDSVEISGVEDRFNASLGTYHDLLKIIKDKDF |
| | LDNEENEDILEDIVLTLTLFEDREMIEERLKTYAHLFDDKVMKQLKRRRYTGWG |
| | RLSRKLINGIRDKQSGKTILDFLKSDGFANRNFMQLIHDDSLTFKEDIQKAQVSG |
| | QGDSLHEHIANLAGSPAIKKGILQTVKVVDELVKVMGRHKPENIVIEMARENQT |
| | TQKGQKNSRERMKRIEEGIKELGSQILKEHPVENTQLQNEKLYLYYLQNGRDM |
| | YVDQELDINRLSDYDVDAIVPQSFLKDDSIDNKVLTRSDKNRGKSDNVPSEEVV |
| | KKMKNYWRQLLNAKLITQRKFDNLTKAERGGLSELDKAGFIKRQLVETRQITK |
| | HVAQILDSRMNTKYDENDKLIREVKVITLKSKLVSDFRKDFQFYKVREINNYHH |
| | AHDAYLNAVVGTALIKKYPKLESEFVYGDYKVYDVRKMIAKSEQEIGKATAKY |
| | FFYSNIMNFFKTEITLANGEIRKRPLIETNGETGEIVWDKGRDFATVRKVLSMPQ |
| | VNIVKKTEVQTGGFSKESILPKRNSDKLIARKKDWDPKKYGGFDSPTVAYSVLV |
| | VAKVEKGKSKKLKSVKELLGITIMERSSFEKNPIDFLEAKGYKEVKKDLIIKLPK |
| | YSLFELENGRKRMLASAGELQKGNELALPSKYVNFLYLASHYEKLKGSPEDNE |
| | QKQLFVEQHKHYLDEIIEQISEFSKRVILADANLDKVLSAYNKHRDKPIREQAENI |
| | IHLFTLTNLGAPAAFKYFDTTIDRKRYTSTKEVLDATLIHQSITGLYETRIDLSQL |
| | GGD |
| PEmax- | SGGSSGGSKRTADGSEFESPKKKRKVSGGSSGGS |
| SGGSx2- | |
| bpSV40NLS- | |
| SGGSx2 linker | |
| (SEQ ID NO: | |
| 6028) | |
| PEmax- | TLNIEDEYRLHETSKEPDVSLGSTWLSDFPQAWAETGGMGLAVRQAPLIIPLKAT |
| MMLV_RT | STPVSIKQYPMSQEARLGIKPHIQRLLDQGILVPCQSPWNTPLLPVKKPGTNDYR |
| D200N T330P | PVQDLREVNKRVEDIHPTVPNPYNLLSGLPPSHQWYTVLDLKDAFFCLRLHPTS |
| L603W T306K | QPLFAFEWRDPEMGISGQLTWTRLPQGFKNSPTLFNEALHRDLADFRIQHPDLIL |
| W313F (SEQ | LQYVDDLLLAATSELDCQQGTRALLQTLGNLGYRASAKKAQICQKQVKYLGYL |
| ID NO: 6034) | LKEGQRWLTEARKETVMGQPTPKTPRQLREFLGKAGFCRLFIPGFAEMAAPLYP |
| | LTKPGTLFNWGPDQQKAYQEIKQALLTAPALGLPDLTKPFELFVDEKQGYAKG |
| | VLTQKLGPWRRPVAYLSKKLDPVAAGWPPCLRMVAAIAVLTKDAGKLTMGQP |
| | LVILAPHAVEALVKQPPDRWLSNARMTHYQALLLDTDRVQFGPVVALNPATLL |
| | PLPEEGLQHNCLDILAEAHGTRPDLTDQPLPDADHTWYTDGSSLLQEGQRKAGA |
| | AVTTETEVIWAKALPAGTSAQRAELIALTQALKMAEGKKLNVYTDSRYAFATA |
| | HIHGEIYRRRGWLTSEGKEIKNKDEILALLKALFLPKRLSIIHCPGHQKGHSAEAR |
| | GNRMADQAARKAAITETPDTSTLLIENSSP |
| PEmax-C- | SGGSKRTADGSEFESPKKKRKV |
| terminal linker- | |
| NLS (SEQ ID | |
| NO: 6029) | |
| PEmax-C- | GSGPAAKRVKLD |
| terminal linker- | |
| NLS2 (SEQ ID | |
| NO: 6030) | |

### PEgRNA for Editing of SLC37A4 Gene

[0223] The term “prime editing guide RNA”, or “PEgRNA”, refers to a guide polynucleotide that comprises one or more intended nucleotide edits for incorporation into the target DNA. In some embodiments, the PEgRNA associates with and directs a prime editor to incorporate the one or more intended nucleotide edits into the target gene via prime editing. “Nucleotide edit” or “intended nucleotide edit” refers to a specified deletion of one or more nucleotides at one specific position, insertion of one or more nucleotides at one specific position, substitution of a single nucleotide, or other alterations at one specific position to be incorporated into the sequence of the target gene. Intended nucleotide edit may refer to the edit on the editing template as compared to the sequence on the target strand of the target gene, or may refer to the edit encoded by the editing template on the newly synthesized single stranded DNA that replaces the editing target sequence, as compared to the editing target sequence. In some embodiments, a PEgRNA comprises a spacer sequence that is complementary or substantially complementary to a search target sequence on a target strand of the target gene. In some embodiments, the PEgRNA comprises a gRNA core that associates with a DNA binding domain, e.g., a CRISPR-Cas protein domain, of a prime editor. In some embodiments, the PEgRNA further comprises an extended nucleotide sequence comprising one or more intended nucleotide edits compared to the endogenous sequence of the target gene, wherein the extended nucleotide sequence may be referred to as an extension arm.

[0224] In certain embodiments, the extension arm comprises a primer binding site sequence (PBS) that can initiate target-primed DNA synthesis. In some embodiments, the PBS is complementary or substantially complementary to a free 3′ end on the edit strand of the target gene at a nick site generated by the prime editor. In some embodiments, the extension arm further comprises an editing template that comprises one or more intended nucleotide edits to be incorporated in the target gene by prime editing. In some embodiments, the editing template is a template for an RNA-dependent DNA polymerase domain or polypeptide of the prime editor, for example, a reverse transcriptase domain. The reverse transcriptase editing template may also be referred to herein as an RT template, or RTT. In some embodiments, the editing template comprises partial complementarity to an editing target sequence in the target gene, e.g., an SLC37A4 gene. In some embodiments, the editing template comprises substantial or partial complementarity to the editing target sequence except at the position of the intended nucleotide edits to be incorporated into the target gene. An exemplary architecture of a PEgRNA including its components is as demonstrated in FIG. 2.

[0225] In some embodiments, a PEgRNA includes only RNA nucleotides and forms an RNA polynucleotide. In some embodiments, a PEgRNA is a chimeric polynucleotide that includes both RNA and DNA nucleotides. For example, a PEgRNA can include DNA in the spacer sequence, the gRNA core, or the extension arm. In some embodiments, a PEgRNA comprises DNA in the spacer sequence. In some embodiments, the entire spacer sequence of a PEgRNA is a DNA sequence. In some embodiments, the PEgRNA comprises DNA in the gRNA core, for example, in a stem region of the gRNA core. In some embodiments, the PEgRNA comprises DNA in the extension arm, for example, in the editing template. An editing template that comprises a DNA sequence may serve as a DNA synthesis template for a DNA polymerase in a prime editor, for example, a DNA-dependent DNA polymerase.

[0226] Accordingly, the PEgRNA may be a chimeric polynucleotide that comprises RNA in the spacer, gRNA core, and/or the PBS sequences and DNA in the editing template.

[0227] Components of a PEgRNA may be arranged in a modular fashion. In some embodiments, the spacer and the extension arm comprising a primer binding site sequence (PBS) and an editing template, e.g., a reverse transcriptase template (RTT), can be interchangeably located in the 5′ portion of the PEgRNA, the 3′ portion of the PEgRNA, or in the middle of the gRNA core. In some embodiments, a PEgRNA comprises a PBS and an editing template sequence in 5′ to 3′ order. In some embodiments, the gRNA core of a PEgRNA of this disclosure may be located in between a spacer and an extension arm of the PEgRNA. In some embodiments, the gRNA core of a PEgRNA may be located at the 3′ end of a spacer. In some embodiments, the gRNA core of a PEgRNA may be located at the 5′ end of a spacer. In some embodiments, the gRNA core of a PEgRNA may be located at the 3′ end of an extension arm. In some embodiments, the gRNA core of a PEgRNA may be located at the 5′ end of an extension arm. In some embodiments, the PEgRNA comprises, from 5′ to 3′: a spacer, a gRNA core, and an extension arm. In some embodiments, the PEgRNA comprises, from 5′ to 3′: a spacer, a gRNA core, an editing template, and a PBS. In some embodiments, the PEgRNA comprises, from 5′ to 3′: an extension arm, a spacer, and a gRNA core. In some embodiments, the PEgRNA comprises, from 5′ to 3′: an editing target, a PBS, a spacer, and a gRNA core.

[0228] In some embodiments, a PEgRNA comprises a single polynucleotide molecule that comprises the spacer sequence, the gRNA core, and the extension arm. In some embodiments, a PEgRNA comprises multiple polynucleotide molecules, for example, two polynucleotide molecules. In some embodiments, a PEgRNA comprise a first polynucleotide molecule that comprises the spacer and a portion of the gRNA core, and a second polynucleotide molecule that comprises the rest of the gRNA core and the extension arm. In some embodiments, the gRNA core portion in the first polynucleotide molecule and the gRNA core portion in the second polynucleotide molecule are at least partly complementary to each other. In some embodiments, the PEgRNA may comprise a first polynucleotide comprising the spacer and a first portion of a gRNA core comprising, which may be also be referred to as a crRNA. In some embodiments, the PEgRNA comprise a second polynucleotide comprising a second portion of the gRNA core and the extension arm, wherein the second portion of the gRNA core may also be referred to as a trans-activating crRNA, or tracr RNA. In some embodiments, the crRNA portion and the tracr RNA portion of the gRNA core are at least partially complementary to each other. In some embodiments, the partially complementary portions of the crRNA and the tracr RNA form a lower stem, a bulge, and an upper stem, as exemplified in FIG. 3.

[0229] In some embodiments, a spacer sequence comprises a region that has substantial complementarity to a search target sequence on the target strand of a double stranded target DNA, e.g., a SLC37A4 gene. In some embodiments, the spacer sequence of a PEgRNA is identical or substantially identical to a protospacer sequence on the edit strand of the target gene (except that the protospacer sequence comprises thymine and the spacer sequence may comprise uracil). In some embodiments, the spacer sequence is at least about 70%, 75%, 80%, 85%, 90%, 95%, or 100% complementary to a search target sequence in the target gene. In some embodiments, the spacer comprises is substantially complementary to the search target sequence.

[0230] In some embodiments, the length of the spacer varies from at least 10 nucleotides to 100 nucleotides. For examples, a spacer may be at least 10 nucleotides, at least 11 nucleotides, at least 12 nucleotides, at least 13 nucleotides, at least 14 nucleotides, at least 15 nucleotides, at least 16 nucleotides, at least 17 nucleotides, at least 18 nucleotides, at least 19 nucleotides, at least 20 nucleotides, at least 30 nucleotides, at least 40 nucleotides, at least 50 nucleotides, at least 60 nucleotides, at least 70 nucleotides, at least 80 nucleotides, at least 90 nucleotides, at least 100 nucleotides. In some embodiments, the spacer is 16 nucleotides, 17 nucleotides, 18 nucleotides, 19 nucleotides, 20 nucleotides, 21 nucleotides, 22 nucleotides, 23 nucleotides, 24 nucleotides, or 25 nucleotides in length. In some embodiments, the spacer is from 15 nucleotides to 30 nucleotides in length, 15 to 25 nucleotides in length, 18 to 22 nucleotides in length, 10 to 20 nucleotides in length, 20 to 30 nucleotides in length, 30 to 40 nucleotides in length, 40 to 50 nucleotides in length, 50 to 60 nucleotides in length, 60 to 70 nucleotides in length, 70 to 80 nucleotides in length, or 90 nucleotides to 100 nucleotides in length. In some embodiments, the spacer is 20 nucleotides in length. In some embodiments, the spacer is 17 to 18 nucleotides in length.

[0231] As used herein in a PEgRNA or a nick guide RNA sequence, or fragments thereof such as a spacer, PBS, or RTT sequence, unless indicated otherwise, it should be appreciated that the letter “T” or “thymine” indicates a nucleobase in a DNA sequence that encodes the PEgRNA or guide RNA sequence, and is intended to refer to a uracil (U) nucleobase of the PEgRNA or guide RNA or any chemically modified uracil nucleobase known in the art, such as 5-methoxyuracil.

[0232] Exemplary sequences for PEgRNA spacers are provided in Table 8.

[0233] The extension arm of a PEgRNA may comprise a primer binding site (PBS) and an editing template (e.g., an RTT). The extension arm may be partially complementary to the spacer. In some embodiments, the editing template (e.g., RTT) is partially complementary to the spacer. In some embodiments, the editing template (e.g., RTT) and the primer binding site (PBS) are each partially complementary to the spacer.

[0234] An extension arm of a PEgRNA may comprise a primer binding site sequence (PBS, or PBS sequence) that hybridizes with a free 3′ end of a single stranded DNA in the target gene (e.g., the SLC37A4 gene) generated by nicking with a prime editor. The length of the PBS sequence may vary depending on, e.g., the prime editor components, the search target sequence and other components of the PEgRNA. In some embodiments, the length of the primer binding site (PBS) varies from at least 2 nucleotides to 50 nucleotides. For examples, a primer binding site (PBS) may be at least 2 nucleotides, at least 3 nucleotides, at least 4 nucleotides, at least 5 nucleotides, at least 6 nucleotides, at least 7 nucleotides, at least 8 nucleotides, at least 9 nucleotides, at least 10 nucleotides, at least 11 nucleotides, at least 12 nucleotides, at least 13 nucleotides, at least 14 nucleotides, at least 15 nucleotides, at least 16 nucleotides, at least 17 nucleotides, at least 18 nucleotides, at least 19 nucleotides, at least 20 nucleotides, at least 30 nucleotides, at least 40 nucleotides, or at least 50 nucleotides in length. In some embodiments, the PBS is at least 6 nucleotides in length. In some embodiments, the PBS is about 4 to 16 nucleotides, about 6 to 16 nucleotides, about 6 to 18 nucleotides, about 6 to 20 nucleotides, about 8 to 20 nucleotides, about 10 to 20 nucleotides, about 12 to 20 nucleotides, about 14 to 20 nucleotides, about 16 to 20 nucleotides, or about 18 to 20 nucleotides in length. In some embodiments, the PBS is about 7 to 15 nucleotides in length. In some embodiments, the PBS is 6, 7, 8, 9, 10, 11, 12, 13, 14, 15, 16, 17, 18, 19, or 20 nucleotides in length. In some embodiments, the PBS is 8, 9, 10, 11, 12, 13, or 14 nucleotides in length.

[0235] The PBS may be complementary or substantially complementary to a DNA sequence in the edit strand of the target gene. By annealing with the edit strand at a free hydroxy group, e.g., a free 3′ end generated by prime editor nicking, the PBS may initiate synthesis of a new single stranded DNA encoded by the editing template at the nick site. In some embodiments, the PBS is at least about 70%, 75%, 80%, 85%, 90%, 95%, or 100% complementary to a region of the edit strand of the target gene (e.g., the SLC37A4 gene). In some embodiments, the PBS is perfectly complementary, or has 100% complementary, to a region of the edit strand of the target gene (e.g., the SLC37A4 gene).

[0236] Exemplary sequences for PBS are provided in Tables 9b, 10b, 11b, 12b, 13b, 14b, 15b, 16b, 17b, 18b, 19b, 20b, 21b, 22b, 23b, and 24b for spacers S01, S02, S03, S04, S05, S06, S07, S08, S09, S10, S11, S12, S13, S14, S15, and S16, respectively.

[0237] An extension arm of a PEgRNA may comprise an editing template that serves as a DNA synthesis template for the DNA polymerase in a prime editor during prime editing.

[0238] The length of an editing template may vary depending on, e.g., the prime editor components, the search target sequence and other components of the PEgRNA. In some embodiments, the editing template serves as a DNA synthesis template for a reverse transcriptase, and the editing template is referred to as a reverse transcription editing template (RTT).

[0239] The editing template (e.g., RTT), in some embodiments, is 2, 3, 4, 5, 6, 7, 8, 9, 10, 11, 12, 13, 14, 15, 16, 17, 18, 19, 20, 21, 22, 23, 24, or 25 nucleotides in length. In some embodiments, the RTT is 12, 13, 14, 15, 16, 17, 18, 19, 20, 21, 22, 23, 24, or 25 nucleotides in length. In some embodiments, the RTT is 16, 17, 18, 19, 20, 21, 22, 23, 24, 25, 26, 27, 28, 29, 30, 31, 32, 33, 34, 35, 36, 37, 38, 39, or 40 nucleotides in length.

[0240] Exemplary sequences for RTT are provided in Tables 9a, 10a, 11a, 12a, 13a, 14a, 15a, 16a, 17a, 18a, 19a, 20a, 21a, 22a, 23a, and 24a for spacers S01, S02, S03, S04, S05, S06, S07, S08, S09, S10, S11, S12, S13, S14, S15, and S16, respectively.

[0241] In some embodiments, the editing template (e.g., RTT) sequence is about 70%, 75%, 80%, 85%, 90%, 95%, or 99% complementary to the editing target sequence on the edit strand of the target gene. In some embodiments, the editing template sequence (e.g., RTT) is substantially complementary to the editing target sequence. In some embodiments, the editing template sequence (e.g., RTT) is complementary to the editing target sequence except at positions of the intended nucleotide edits to be incorporated in the target gene. In some embodiments, the editing template comprises a nucleotide sequence comprising about 85% to about 95% complementarity to an editing target sequence in the edit strand in the target gene (e.g., the SLC37A4 gene). In some embodiments, the editing template comprises about 86%, about 87%, about 88%, about 89%, about 90%, about 91%, about 92%, about 93%, about 94%, about 95%, about 96%, about 97%, about 98%, or about 99% complementarity to an editing target sequence in the edit strand of the target gene (e.g., the SLC37A4 gene).

[0242] An intended nucleotide edit in an editing template of a PEgRNA may comprise various types of alterations as compared to the target gene sequence. In some embodiments, the nucleotide edit is a single nucleotide substitution as compared to the target gene sequence. In some embodiments, the nucleotide edit is a deletion as compared to the target gene sequence. In some embodiments, the nucleotide edit is an insertion as compared to the target gene sequence. In some embodiments, the editing template comprises one to ten intended nucleotide edits as compared to the target gene sequence. In some embodiments, the editing template comprises one or more intended nucleotide edits as compared to the target gene sequence. In some embodiments, the editing template comprises two or more intended nucleotide edits as compared to the target gene sequence. In some embodiments, the editing template comprises three or more intended nucleotide edits as compared to the target gene sequence. In some embodiments, the editing template comprises four or more, five or more, or six or more intended nucleotide edits as compared to the target gene sequence. In some embodiments, the editing template comprises two single nucleotide substitutions, insertions, deletions, or any combination thereof, as compared to the target gene sequence. In some embodiments, the editing template comprises three single nucleotide substitutions, insertions, deletions, or any combination thereof, as compared to the target gene sequence. In some embodiments, the editing template comprises four, five, or six single nucleotide substitutions, insertions, deletions, or any combination thereof, as compared to the target gene sequence. In some embodiments, a nucleotide substitution comprises an adenine (A)-to-thymine (T) substitution. In some embodiments, a nucleotide substitution comprises an A-to-guanine (G) substitution. In some embodiments, a nucleotide substitution comprises an A-to-cytosine (C) substitution. In some embodiments, a nucleotide substitution comprises a T-to-A substitution. In some embodiments, a nucleotide substitution comprises a T-to-G substitution. In some embodiments, a nucleotide substitution comprises a T-C substitution. In some embodiments, a nucleotide substitution comprises a G-to-A substitution. In some embodiments, a nucleotide substitution comprises a G-to-T substitution. In some embodiments, a nucleotide substitution comprises a G-to-C substitution. In some embodiments, a nucleotide substitution comprises a C-to-A substitution. In some embodiments, a nucleotide substitution comprises a C-to-T substitution. In some embodiments, a nucleotide substitution comprises a C-to-G substitution.

[0243] In some embodiments, a nucleotide insertion is at least 1 nucleotide, at least 2 nucleotides, at least 3 nucleotides, at least 4 nucleotides, at least 5 nucleotides, at least 6 nucleotides, at least 7 nucleotides, at least 8 nucleotides, at least 9 nucleotides, at least 10 nucleotides, at least 11 nucleotides, at least 12 nucleotides, at least 13 nucleotides, at least 14 nucleotides, at least 15 nucleotides, at least 16 nucleotides, at least 17 nucleotides, at least 18 nucleotides, at least 19 nucleotides, or at least 20 nucleotides in length. In some embodiments, a nucleotide insertion is from 1 to 2 nucleotides, from 1 to 3 nucleotides, from 1 to 4 nucleotides, from 1 to 5 nucleotides, form 2 to 5 nucleotides, from 3 to 5 nucleotides, from 3 to 6 nucleotides, from 3 to 8 nucleotides, from 4 to 9 nucleotides, from 5 to 10 nucleotides, from 6 to 11 nucleotides, from 7 to 12 nucleotides, from 8 to 13 nucleotides, from 9 to 14 nucleotides, from 10 to 15 nucleotides, from 11 to 16 nucleotides, from 12 to 17 nucleotides, from 13 to 18 nucleotides, from 14 to 19 nucleotides, from 15 to 20 nucleotides in length. In some embodiments, a nucleotide insertion is a single nucleotide insertion. In some embodiments, a nucleotide insertion comprises insertion of two nucleotides.

[0244] The editing template of a PEgRNA may comprise one or more intended nucleotide edits, compared to the SLC37A4 gene to be edited. Position of the intended nucleotide edit(s) relevant to other components of the PEgRNA, or to particular nucleotides (e.g., mutations) in the SLC37A4 target gene may vary. In some embodiments, the nucleotide edit is in a region of the PEgRNA corresponding to or homologous to the protospacer sequence. In some embodiments, the nucleotide edit is in a region of the PEgRNA corresponding to a region of the SLC37A4 gene outside of the protospacer sequence.

[0245] In some embodiments, the position of a nucleotide edit incorporation in the target gene may be determined based on position of the protospacer adjacent motif (PAM). For instance, the intended nucleotide edit may be installed in a sequence corresponding to the protospacer adjacent motif (PAM) sequence. In some embodiments, a nucleotide edit in the editing template is at a position corresponding to the 5′ most nucleotide of the PAM sequence. In some embodiments, a nucleotide edit in the editing template is at a position corresponding to the 3′ most nucleotide of the PAM sequence. In some embodiments, position of an intended nucleotide edit in the editing template may be referred to by aligning the editing template with the partially complementary edit strand of the target gene, and referring to nucleotide positions on the editing strand where the intended nucleotide edit is incorporated. In some embodiments, a nucleotide edit is incorporated at a position corresponding to about 0, 1, 2, 3, 4, 5, 6, 7, 8, 9, 10, 11, 12, 13, 14, 15, 16, 17, 18, 19, 20, 21, 22, 23, 24, 25, 26, 27, 28, 29, 30, 31, 32, 33, 34, 35, 36, 37, 38, 39, or 40 base pairs upstream of the 5′ most nucleotide of the PAM sequence in the edit strand of the target gene. By 0 base pair upstream or downstream of a reference position, it is meant that the intended nucleotide is immediately upstream or downstream of the reference position. In some embodiments, a nucleotide edit is incorporated at a position corresponding to about 0 to 2 base pairs, 0 to 4 base pairs, 0 to 6 base pairs, 0 to 8 base pairs, 0 to 10 base pairs, 2 to 4 base pairs, 2 to 6 base pairs, 2 to 8 base pairs, 2 to 10 base pairs, 2 to 12 base pairs, 4 to 6 base pairs, 4 to 8 base pairs, 4 to 10 base pairs, 4 to 12 base pairs, 4 to 14 base pairs, 6 to 8 base pairs, 6 to 10 base pairs, 6 to 12 base pairs, 6 to 14 base pairs, 6 to 16 base pairs, 8 to 10 base pairs, 8 to 12 base pairs, 8 to 14 base pairs, 8 to 16 base pairs, 8 to 18 base pairs, 10 to 12 base pairs, 10 to 14 base pairs, 10 to 16 base pairs, 10 to 18 base pairs, 10 to 20 base pairs, 12 to 14 base pairs, 12 to 16 base pairs, 12 to 18 base pairs, 12 to 20 base pairs, 12 to 22 base pairs, 14 to 16 base pairs, 14 to 18 base pairs, 14 to 20 base pairs, 14 to 22 base pairs, 14 to 24 base pairs, 16 to 18 base pairs, 16 to 20 base pairs, 16 to 22 base pairs, 16 to 24 base pairs, 16 to 26 base pairs, 18 to 20 base pairs, 18 to 22 base pairs, 18 to 24 base pairs, 18 to 26 base pairs, 18 to 28 base pairs, 20 to 22 base pairs, 20 to 24 base pairs, 20 to 26 base pairs, 20 to 28 base pairs, or 20 to 30 base pairs upstream of the 5′ most nucleotide of the PAM sequence. In some embodiments, the nucleotide edit is incorporated at a position corresponding to 3 base pairs upstream of the 5′ most nucleotide of the PAM sequence. In some embodiments, the nucleotide edit in is incorporated at a position corresponding to 4 base pairs upstream of the 5′ most nucleotide of the PAM sequence. In some embodiments, the nucleotide edit is incorporated at a position corresponding to 5 base pairs upstream of the 5′ most nucleotide of the PAM sequence. In some embodiments, the nucleotide edit in the editing template is at a position corresponding to 6 base pairs upstream of the 5′ most nucleotide of the PAM sequence.

[0246] In some embodiments, an intended nucleotide edit is incorporated at a position corresponding to about 0, 1, 2, 3, 4, 5, 6, 7, 8, 9, 10, 11, 12, 13, 14, 15, 16, 17, 18, 19, 20, 21, 22, 23, 24, 25, 26, 27, 28, 29, 30, 31, 32, 33, 34, 35, 36, 37, 38, 39, or 40 base pairs downstream of the 5′ most nucleotide of the PAM sequence in the edit strand of the target gene. In some embodiments, a nucleotide edit is incorporated at a position corresponding to about 0 to 2 base pairs, 0 to 4 base pairs, 0 to 6 base pairs, 0 to 8 base pairs, 0 to 10 base pairs, 2 to 4 base pairs, 2 to 6 base pairs, 2 to 8 base pairs, 2 to 10 base pairs, 2 to 12 base pairs, 4 to 6 base pairs, 4 to 8 base pairs, 4 to 10 base pairs, 4 to 12 base pairs, 4 to 14 base pairs, 6 to 8 base pairs, 6 to 10 base pairs, 6 to 12 base pairs, 6 to 14 base pairs, 6 to 16 base pairs, 8 to 10 base pairs, 8 to 12 base pairs, 8 to 14 base pairs, 8 to 16 base pairs, 8 to 18 base pairs, 10 to 12 base pairs, 10 to 14 base pairs, 10 to 16 base pairs, 10 to 18 base pairs, 10 to 20 base pairs, 12 to 14 base pairs, 12 to 16 base pairs, 12 to 18 base pairs, 12 to 20 base pairs, 12 to 22 base pairs, 14 to 16 base pairs, 14 to 18 base pairs, 14 to 20 base pairs, 14 to 22 base pairs, 14 to 24 base pairs, 16 to 18 base pairs, 16 to 20 base pairs, 16 to 22 base pairs, 16 to 24 base pairs, 16 to 26 base pairs, 18 to 20 base pairs, 18 to 22 base pairs, 18 to 24 base pairs, 18 to 26 base pairs, 18 to 28 base pairs, 20 to 22 base pairs, 20 to 24 base pairs, 20 to 26 base pairs, 20 to 28 base pairs, or 20 to 30 base pairs downstream of the 5′ most nucleotide of the PAM sequence. In some embodiments, a nucleotide edit is incorporated at a position corresponding to 3 base pairs downstream of the 5′ most nucleotide of the PAM sequence. In some embodiments, a nucleotide edit is incorporated at a position corresponding to 4 base pairs downstream of the 5′ most nucleotide of the PAM sequence. In some embodiments, a nucleotide edit is incorporated at a position corresponding to 5 base pairs downstream of the 5′ most nucleotide of the PAM sequence. In some embodiments, a nucleotide edit is incorporated at a position corresponding to 6 base pairs downstream of the 5′ most nucleotide of the PAM sequence. By “upstream” and “downstream” it is intended to define relevant positions at least two regions or sequences in a nucleic acid molecule orientated in a 5′-to-3′ direction. For example, a first sequence is upstream of a second sequence in a DNA molecule where the first sequence is positioned 5′ to the second sequence. Accordingly, the second sequence is downstream of the first sequence.

[0247] In some embodiments, the position of a nucleotide edit incorporation in the target gene may be determined based on position of the nick site. In some embodiments, position of an intended nucleotide edit is 0, 1, 2, 3, 4, 5, 6, 7, 8, 9, 10, 11, 12, 13, 14, 15, 16, 17, 18, 19, 20, 21, 22, 23, 24, 25, 26, 27, 28, 29, 30, 31, 32, 33, 34, 35, 36, 37, 38, 39, 40, 45, 50, 55, 60, 65, 70, 75, 80, 85, 90, 95, 100, 110, 120, 130, 140, or 150 nucleotides apart from the nick site. In some embodiments, position of an intended nucleotide edit is 0, 1, 2, 3, 4, 5, 6, 7, 8, 9, 10, 11, 12, 13, 14, 15, 16, 17, 18, 19, 20, 21, 22, 23, 24, 25, 26, 27, 28, 29, 30, 31, 32, 33, 34, 35, 36, 37, 38, 39, 40, 45, 50, 55, 60, 65, 70, 75, 80, 85, 90, 95, 100, 110, 120, 130, 140, or 150 nucleotides downstream of the nick site on the PAM strand (or the non-target strand, or the edit strand) of the double stranded target DNA. In some embodiments, position of the intended nucleotide edit in the editing template may be referred to by aligning the editing template with the partially complementary editing target sequence on the edit strand, and referring to nucleotide positions on the editing strand where the intended nucleotide edit is incorporated. Accordingly, in some embodiments, a nucleotide edit in an editing template is at a position corresponding to a position about 0, 1, 2, 3, 4, 5, 6, 7, 8, 9, 10, 11, 12, 13, 14, 15, 16, 17, 18, 19, 20, 21, 22, 23, 24, 25, 26, 27, 28, 29, 30, 31, 32, 33, 34, 35, 36, 37, 38, 39, 40, 45, 50, 55, 60, 65, 70, 75, 80, 85, 90, 95, 100, 110, 120, 130, 140, or 150 nucleotides apart from the nick site. In some embodiments, a nucleotide edit in an editing template is at a position corresponding to a position about 0 to 2 nucleotides, 0 to 4 nucleotides, 0 to 6 nucleotides, 0 to 8 nucleotides, 0 to 10 nucleotides, 2 to 4 nucleotides, 2 to 6 nucleotides, 2 to 8 nucleotides, 2 to 10 nucleotides, 2 to 12 nucleotides, 4 to 6 nucleotides, 4 to 8 nucleotides, 4 to 10 nucleotides, 4 to 12 nucleotides, 4 to 14 nucleotides, 6 to 8 nucleotides, 6 to 10 nucleotides, 6 to 12 nucleotides, 6 to 14 nucleotides, 6 to 16 nucleotides, 8 to 10 nucleotides, 8 to 12 nucleotides, 8 to 14 nucleotides, 8 to 16 nucleotides, 8 to 18 nucleotides, 10 to 12 nucleotides, 10 to 14 nucleotides, 10 to 16 nucleotides, 10 to 18 nucleotides, 10 to 20 nucleotides, 12 to 14 nucleotides, 12 to 16 nucleotides, 12 to 18 nucleotides, 12 to 20 nucleotides, 12 to 22 nucleotides, 14 to 16 nucleotides, 14 to 18 nucleotides, 14 to 20 nucleotides, 14 to 22 nucleotides, 14 to 24 nucleotides, 16 to 18 nucleotides, 16 to 20 nucleotides, 16 to 22 nucleotides, 16 to 24 nucleotides, 16 to 26 nucleotides, 18 to 20 nucleotides, 18 to 22 nucleotides, 18 to 24 nucleotides, 18 to 26 nucleotides, 18 to 28 nucleotides, 20 to 22 nucleotides, 20 to 24 nucleotides, 20 to 26 nucleotides, 20 to 28 nucleotides, 20 to 30 nucleotides, 30 to 40 nucleotides, 40 to 50 nucleotides, 50 to 60 nucleotides, 60 to 70 nucleotides, 70 to 80 nucleotides, 80 to 90 nucleotides, 90 to 100 nucleotides, 100 to 110 nucleotides, 110 to 120 nucleotides, 120 to 130 nucleotides, 130 to 140 nucleotides, or 140 to 150 nucleotides apart from the nick site. In some embodiments, when referred to in the context of the PAM strand (or the non-target strand, or the edit strand), a nucleotide edit in an editing template is at a position corresponding to a position about 0 to 2 nucleotides, 0 to 4 nucleotides, 0 to 6 nucleotides, 0 to 8 nucleotides, 0 to 10 nucleotides, 2 to 4 nucleotides, 2 to 6 nucleotides, 2 to 8 nucleotides, 2 to 10 nucleotides, 2 to 12 nucleotides, 4 to 6 nucleotides, 4 to 8 nucleotides, 4 to 10 nucleotides, 4 to 12 nucleotides, 4 to 14 nucleotides, 6 to 8 nucleotides, 6 to 10 nucleotides, 6 to 12 nucleotides, 6 to 14 nucleotides, 6 to 16 nucleotides, 8 to 10 nucleotides, 8 to 12 nucleotides, 8 to 14 nucleotides, 8 to 16 nucleotides, 8 to 18 nucleotides, 10 to 12 nucleotides, 10 to 14 nucleotides, 10 to 16 nucleotides, 10 to 18 nucleotides, 10 to 20 nucleotides, 12 to 14 nucleotides, 12 to 16 nucleotides, 12 to 18 nucleotides, 12 to 20 nucleotides, 12 to 22 nucleotides, 14 to 16 nucleotides, 14 to 18 nucleotides, 14 to 20 nucleotides, 14 to 22 nucleotides, 14 to 24 nucleotides, 16 to 18 nucleotides, 16 to 20 nucleotides, 16 to 22 nucleotides, 16 to 24 nucleotides, 16 to 26 nucleotides, 18 to 20 nucleotides, 18 to 22 nucleotides, 18 to 24 nucleotides, 18 to 26 nucleotides, 18 to 28 nucleotides, 20 to 22 nucleotides, 20 to 24 nucleotides, 20 to 26 nucleotides, 20 to 28 nucleotides, 20 to 30 nucleotides, 30 to 40 nucleotides, 40 to 50 nucleotides, 50 to 60 nucleotides, 60 to 70 nucleotides, 70 to 80 nucleotides, 80 to 90 nucleotides, 90 to 100 nucleotides, 100 to 110 nucleotides, 110 to 120 nucleotides, 120 to 130 nucleotides, 130 to 140 nucleotides, or 140 to 150 nucleotides downstream from the nick site. The relative positions of the intended nucleotide edit(s) and nick site may be referred to by numbers. For example, in some embodiments, the nucleotide immediately downstream of the nick site on a PAM strand (or the non-target strand, or the edit strand) may be referred to as at position 0. The nucleotide immediately upstream of the nick site on the PAM strand (or the non-target strand, or the edit strand) may be referred to as at position −1. The nucleotides downstream of position 0 on the PAM strand may be referred to as at positions +1, +2, +3, +4, . . . +n, and the nucleotides upstream of position −1 on the PAM strand may be referred to as at positions −2, −3, −4, . . . , −n. Accordingly, in some embodiments, the nucleotide in the editing template that corresponds to position 0 when the editing template is aligned with the partially complementary editing target sequence by complementarity may also be referred to as position 0 in the editing template, the nucleotides in the editing template corresponding to the nucleotides at positions +1, +2, +3, +4, . . . , +n on the PAM strand of the double stranded target DNA may also be referred to as at positions +1, +2, +3, +4, . . . , +n in the editing template, and the nucleotides in the editing template corresponding to the nucleotides at positions −1, −2, −3, −4, . . . , −n on the PAM strand on the double stranded target DNA may also be referred to as at positions −1, −2, −3, −4, . . . , −n on the editing template, even though when the PEgRNA is viewed as a standalone nucleic acid, positions +1, +2, +3, +4, . . . , +n are 5′ of position 0 and positions −1, −2, −3, −4, . . . , −n are 3′ of position 0 in the editing template. In some embodiments, an intended nucleotide edit is at position +n of the editing template relative to position 0. Accordingly, the intended nucleotide edit may be incorporated at position +n of the PAM strand of the double stranded target DNA (and subsequently, the target strand of the double stranded target DNA) by prime editing. The number n may be referred to as the nick to edit distance. When referred to in the PEgRNA, positions of the one or more intended nucleotide edits may be referred to relevant to components of the PEgRNA. For example, an intended nucleotide edit may be 5′ or 3′ to the PBS. In some embodiments, a PEgRNA comprises the structure, from 5′ to 3′: a spacer, a gRNA core, an editing template, and a PBS. In some embodiments, the intended nucleotide edit is 0, 1, 2, 3, 4, 5, 6, 7, 8, 9, 10, 11, 12, 13, 14, 15, 16, 17, 18, 19, 20, 21, 22, 23, 24, 25, 26, 27, 28, 29, 30, 31, 32, 33, 34, 35, 36, 37, 38, 39, or 40 base pairs upstream to the 5′ most nucleotide of the PBS. In some embodiments, the intended nucleotide edit is 0 to 2 base pairs, 0 to 4 base pairs, 0 to 6 base pairs, 0 to 8 base pairs, 0 to 10 base pairs, 2 to 4 base pairs, 2 to 6 base pairs, 2 to 8 base pairs, 2 to 10 base pairs, 2 to 12 base pairs, 4 to 6 base pairs, 4 to 8 base pairs, 4 to 10 base pairs, 4 to 12 base pairs, 4 to 14 base pairs, 6 to 8 base pairs, 6 to 10 base pairs, 6 to 12 base pairs, 6 to 14 base pairs, 6 to 16 base pairs, 8 to 10 base pairs, 8 to 12 base pairs, 8 to 14 base pairs, 8 to 16 base pairs, 8 to 18 base pairs, 10 to 12 base pairs, 10 to 14 base pairs, 10 to 16 base pairs, 10 to 18 base pairs, 10 to 20 base pairs, 12 to 14 base pairs, 12 to 16 base pairs, 12 to 18 base pairs, 12 to 20 base pairs, 12 to 22 base pairs, 14 to 16 base pairs, 14 to 18 base pairs, 14 to 20 base pairs, 14 to 22 base pairs, 14 to 24 base pairs, 16 to 18 base pairs, 16 to 20 base pairs, 16 to 22 base pairs, 16 to 24 base pairs, 16 to 26 base pairs, 18 to 20 base pairs, 18 to 22 base pairs, 18 to 24 base pairs, 18 to 26 base pairs, 18 to 28 base pairs, 20 to 22 base pairs, 20 to 24 base pairs, 20 to 26 base pairs, 20 to 28 base pairs, or 20 to 30 base pairs upstream to the 5′ most nucleotide of the PBS.

[0248] The corresponding positions of the intended nucleotide edit incorporated in the target gene may also be referred to based on the nicking position generated by a prime editor based on sequence homology and complementarity. For example, in embodiments, the distance between the nucleotide edit to be incorporated into the target SLC37A4 gene and the nick generated by the prime editor may be determined when the spacer hybridizes with the search target sequence and the extension arm hybridizes with the editing target sequence. In certain embodiments, the position of the nucleotide edit can be in any position downstream of the nick site on the edit strand (or the PAM strand) generated by the prime editor, such that the distance between the nick site and the intended nucleotide edit is 0, 1, 2, 3, 4, 5, 6, 7, 8, 9, 10, 11, 12, 13, 14, 15, 16, 17, 18, 19, 20, 21, 22, 23, 24, 25, 26, 27, 28, 29, or 30 nucleotides in length. In some embodiments, the position of the nucleotide edit is 0, 1, 2, 3, 4, 5, 6, 7, 8, 9, 10, 11, 12, 13, 14, 15, 16, 17, 18, 19, 20, 21, 22, 23, 24, 25, 26, 27, 28, 29, or 30 nucleotides upstream of the nick site on the edit strand. In some embodiments, the position of the nucleotide edit is 0, 1, 2, 3, 4, 5, 6, 7, 8, 9, 10, 11, 12, 13, 14, 15, 16, 17, 18, 19, 20, 21, 22, 23, 24, 25, 26, 27, 28, 29, or 30 nucleotides downstream of the nick site on the edit strand. In some embodiments, the position of the nucleotide edit is 0 base pairs from the nick site on the edit strand, that is, the editing position is at the same position as the nick site. As used herein, the distance between the nick site and the nucleotide edit, for example, where the nucleotide edit comprises an insertion or deletion, refers to the 5′ most position of the nucleotide edit for a nick that creates a 3′ free end on the edit strand (i.e., the “near position” of the nucleotide edit to the nick site). Similarly, as used herein, the distance between the nick site and a PAM position edit, for example, where the nucleotide edit comprises an insertion, deletion, or substitution of two or more contiguous nucleotides, refers to the 5′ most position of the nucleotide edit and the 5′ most position of the PAM sequence.

[0249] In some embodiments, the editing template extends beyond a nucleotide edit to be incorporated to the target SLC37A4 gene sequence. For example, in some embodiments, the editing template comprises at least 1, 2, 3, 4, 5, 6, 7, 8, 9, 10, 11, 12, 13, 14, 15, 16, 17, 18, 19, 20, 21, 22, 23, 24, 25, 26, 27, 28, 29 or 30 base pairs 3′ to the nucleotide edit to be incorporated to the target SLC37A4 gene sequence. In some embodiments, the editing template comprises at least 4 to 30 base pairs 3′ to the nucleotide edit to be incorporated to the target SLC37A4 gene sequence. In some embodiments, the editing template comprises at least 4 to 25 base pairs 3′ to the nucleotide edit to be incorporated to the target SLC37A4 gene sequence. In some embodiments, the editing template comprises at least 4 to 20 base pairs 3′ to the nucleotide edit to be incorporated to the target SLC37A4 gene sequence. In some embodiments, the editing template comprises at least 4 to 30 base pairs 5′ to the nucleotide edit to be incorporated to the target SLC37A4 gene sequence. In some embodiments, the editing template comprises at least 4 to 25 base pairs 5′ to the nucleotide edit to be incorporated to the target SLC37A4 gene sequence. In some embodiments, the editing template comprises at least 4 to 20 base pairs 5′ to the nucleotide edit to be incorporated to the target SLC37A4 gene sequence.

[0250] In some embodiments, the editing template comprises an adenine at the first nucleobase position (e.g., for a PEgRNA following 5′-spacer-gRNA core-RTT-PBS-3′ orientation, the 5′ most nucleobase is the “first base”). In some embodiments, the editing template comprises a guanine at the first nucleobase position (e.g., for a PEgRNA following 5′-spacer-gRNA core-RTT-PBS-3′ orientation, the 5′ most nucleobase is the “first base”). In some embodiments, the editing template comprises an uracil at the first nucleobase position (e.g., for a PEgRNA following 5′-spacer-gRNA core-RTT-PBS-3′ orientation, the 5′ most nucleobase is the “first base”). In some embodiments, the editing template comprises a cytosine at the first nucleobase position (e.g., for a PEgRNA following 5′-spacer-gRNA core-RTT-PBS-3′ orientation, the 5′ most nucleobase is the “first base”). In some embodiments, the editing template does not comprise a cytosine at the first nucleobase position (e.g., for a PEgRNA following 5′-spacer-gRNA core-RTT-PBS-3′ orientation, the 5′ most nucleobase is the “first base”).

[0251] The editing template of a PEgRNA may encode a new single stranded DNA (e.g., by reverse transcription) to replace a target sequence in the target gene. In some embodiments, the editing target sequence in the edit strand of the target gene is replaced by the newly synthesized strand, and the nucleotide edit(s) are incorporated in the region of the target gene. In some embodiments, the target gene is an SLC37A4 gene. In some embodiments, the editing template of the PEgRNA encodes a newly synthesized single stranded DNA that comprises a wild type SLC37A4 gene sequence. In some embodiments, the newly synthesized DNA strand replaces the editing target sequence in the target SLC37A4 gene, wherein the editing target sequence (or the endogenous sequence complementary to the editing target sequence on the target strand of the SLC37A4 gene) comprises a mutation compared to a wild type SLC37A4 gene. In some embodiments, the mutation is associated with retinal degenerative disease, such as Glycogen storage disease type 1B.

[0252] In some embodiments, the editing target sequence comprises a mutation in exon 8 of the SLC37A4 gene as compared to a wild type SLC37A4 gene. In some embodiments, the editing target sequence comprises a mutation that is located at position 1015 of the coding sequence of the G6PT1/SLC37A4 protein. In some embodiments, the editing target sequence comprises a c. 1015G->T mutation (on the sense strand) or a C->A mutation (on the antisense strand) at position 1015 of the coding sequence of the G6PT1 protein. In some embodiments, the editing target sequence comprises a mutation that is located at position 1042 of the coding sequence of the G6PT1/SLC37A4 protein. In some embodiments, the editing target sequence comprises a c. 1042delCT mutation (on the sense strand) or a delAG mutation (on the antisense strand) at position 1042 of the coding sequence of the G6PT1/SLC37A4 protein.

[0253] In some embodiments, the editing template comprises one or more intended nucleotide edits compared to the sequence on the target strand of the SLC37A4 gene that is complementary to the editing target sequence. In some embodiments, the editing template encodes a single stranded DNA that comprises one or more intended nucleotide edits compared to the editing target sequence. In some embodiments, the single stranded DNA replaces the editing target sequence by prime editing, thereby incorporating the one or more intended nucleotide edits. In some embodiments, the one or more intended nucleotide edits comprises a G-T substitution at a position corresponding to position 1015 of the coding sequence of the G6PT1 protein compared to the editing target sequence. In some embodiments, the one or more intended nucleotide edits comprises an A-C substitution in the anti-sense strand at a position corresponding to position 1015 of the coding sequence of the G6PT1 protein compared to the editing target sequence. In some embodiments, the one or more intended nucleotide edits comprises a CT insertion at a position corresponding to position 1042 of the coding sequence of the G6PT1 protein compared to the editing target sequence. In some embodiments, the one or more intended nucleotide edits comprises an AG insertion in the anti-sense strand at a position corresponding to position 1042 of the coding sequence of the G6PT1 protein compared to the editing target sequence. In some embodiments, incorporation of the one or more intended nucleotide edits corrects the mutation in the editing target sequence to wild type nucleotides at corresponding positions in the SLC37A4 gene. As used herein, “correcting” a mutation means restoring a wild type sequence at the place of the mutation in the double stranded target DNA, e.g. target gene, by prime editing. In some embodiments, the editing template comprises and/or encodes a wild type SLC37A4 gene sequence.

[0254] In some embodiments, incorporation of the one or more intended nucleotide edits does not correct the mutation in the editing target sequence to wild type sequence, but allows for expression of a functional G6PT1 protein encoded by the SLC37A4 gene. For example, in some embodiments, incorporation of the one or more intended nucleotide edits results in one or more codons that are different from a wild type codon but encode one or more amino acids same as the wild type G6PT1 protein. In some embodiments, incorporation of the one or more intended nucleotide edits results in one or more codons that encode one or more amino acids different from the wild type G6PT1 protein, but allows for expression of a functional G6PT1 protein.

[0255] A guide RNA core (also referred to herein as the gRNA core, gRNA scaffold, or gRNA backbone sequence) of a PEgRNA may contain a polynucleotide sequence that binds to a DNA binding domain (e.g., Cas9) of a prime editor. The gRNA core may interact with a prime editor as described herein, for example, by association with a DNA binding domain, such as a DNA nickase of the prime editor.

[0256] One of skill in the art will recognize that different prime editors having different DNA binding domains from different DNA binding proteins may require different gRNA core sequences specific to the DNA binding protein. In some embodiments, the gRNA core is capable of binding to a Cas9-based prime editor. In some embodiments, the gRNA core is capable of binding to a Cpf1-based prime editor. In some embodiments, the gRNA core is capable of binding to a Cas12b-based prime editor.

[0257] In some embodiments, the gRNA core comprises regions and secondary structures involved in binding with specific CRISPR Cas proteins. For example, in a Cas9 based prime editing system, the gRNA core of a PEgRNA may comprise one or more regions of a base paired “lower stem” adjacent to the spacer sequence and a base paired “upper stem” following the lower stem, where the lower stem and upper stem may be connected by a “bulge” comprising unpaired RNAs. The gRNA core may further comprise a “nexus” distal from the spacer sequence, followed by a hairpin structure, e.g., at the 3′ end, as exemplified in FIG. 3. In some embodiments, the gRNA core comprises modified nucleotides as compared to a wild type gRNA core in the lower stem, upper stem, and/or the hairpin. For example, nucleotides in the lower stem, upper stem, an/or the hairpin regions may be modified, deleted, or replaced. In some embodiments, RNA nucleotides in the lower stem, upper stem, an/or the hairpin regions may be replaced with one or more DNA sequences. In some embodiments, the gRNA core comprises unmodified or wild type RNA sequences in the nexus and/or the bulge regions. In some embodiments, the gRNA core does not include long stretches of A-T pairs, for example, a GUUUU-AAAAC pairing element.

[0258] In some embodiments, the gRNA core comprises the sequences (as with all RNA sequences provided herein, the T residues in the below sequences may be replaced with U residues): GTTTTAGAGCTAGAAATAGCAAGTTAAAATAAGGCTAGTCCGTTATCAACTTGAA AAAGTGGCACCGAGTCGGTGC (SEQ ID NO: 6035); GITTGAGAGCTAGAAATAGCAAGTTTAAATAAGGCTAGTCCGTTATCAACTTGAA AAAGTGGGACCGAGTCGGTCC (SEQ ID NO: 6036), or GTTTAAGAGCTATGCTGGAAACAGCATAGCAAGTTTAAATAAGGCTAGTCCGTTA TCAACTTGAAAAAGTGGCACCGAGTCGGTGC (SEQ ID NO: 6037). In some embodiments, the gRNA core comprises the sequence GTTTTAGAGCTAGAAATAGCAAGTTAAAATAAGGCTAGTCCGTTATCAACTTGAA AAAGTGGCACCGAGTCGGTGC (SEQ ID NO: 6035). Any gRNA core sequences known in the art are also contemplated in the prime editing compositions described herein.

[0259] In some embodiments, the gRNA core comprises the sequence: GUUUUAGAGCUAGAAAUAGCAAGUUAAAAUAAGGCUAGUCCGUUAUCAACUU GAAAAAGUGGCACCGAGUCGGUGC (SEQ ID NO: 54); GUUUGAGAGCUAGAAAUAGCAAGUUUAAAUAAGGCUAGUCCGUUAUCAACUU GAAAAAGUGGGACCGAGUCGGUCC (SEQ ID NO: 55), or GUUUAAGAGCUAUGCUGGAAACAGCAUAGCAAGUUUAAAUAAGGCUAGUCCG UUAUCAACUUGAAAAAGUGGCACCGAGUCGGUGC (SEQ ID NO: 56). In some embodiments, the gRNA core comprises the sequence GUUUUAGAGCUAGAAAUAGCAAGUUAAAAUAAGGCUAGUCCGUUAUCAACUU GAAAAAGUGGCACCGAGUCGGUGC (SEQ ID NO: 54). Any gRNA core sequences known in the art are also contemplated in the prime editing compositions described herein.

[0260] A PEgRNA may also comprise optional modifiers, e.g., 3′ end modifier region and/or an 5′ end modifier region. In some embodiments, a PEgRNA comprises at least one nucleotide that is not part of a spacer, a gRNA core, or an extension arm. The optional sequence modifiers could be positioned within or between any of the other regions shown, and not limited to being located at the 3′ and 5′ ends. In certain embodiments, the PEgRNA comprises secondary RNA structure, such as, but not limited to, aptamers, hairpins, stem/loops, toeloops, and/or RNA-binding protein recruitment domains (e.g., the MS2 aptamer which recruits and binds to the MS2cp protein). In some embodiments, a PEgRNA comprises a short stretch of uracil at the 5′ end or the 3′ end. For example, in some embodiments, a PEgRNA comprising a 3′ extension arm comprises a “UUU” sequence at the 3′ end of the extension arm. In some embodiments, a PEgRNA comprises a toeloop sequence at the 3′ end. In some embodiments, the PEgRNA comprises a 3′ extension arm and a toeloop sequence at the 3′ end of the extension arm. In some embodiments, the PEgRNA comprises a 5′ extension arm and a toeloop sequence at the 5′ end of the extension arm. In some embodiments, the PEgRNA comprises a toeloop element having the sequence 5′-GAAANNNNN-3′, wherein N is any nucleobase. In some embodiments, the secondary RNA structure is positioned within the spacer. In some embodiments, the secondary structure is positioned within the extension arm. In some embodiments, the secondary structure is positioned within the gRNA core. In some embodiments, the secondary structure is positioned between the spacer and the gRNA core, between the gRNA core and the extension arm, or between the spacer and the extension arm. In some embodiments, the secondary structure is positioned between the PBS and the editing template. In some embodiments the secondary structure is positioned at the 3′ end or at the 5′ end of the PEgRNA. In some embodiments, the PEgRNA comprises a transcriptional termination signal at the 3′ end of the PEgRNA. In addition to secondary RNA structures, the PEgRNA may comprise a chemical linker or a poly(N) linker or tail, where “N” can be any nucleobase. In some embodiments, the chemical linker may function to prevent reverse transcription of the gRNA core.

[0261] In some embodiments, the secondary structure comprises a pseudoknot. In some embodiments, the secondary structure comprises a pseudoknot derived from a virus. In some embodiments, the secondary structure comprises a pseudoknot of a Moloney murine leukemia virus (M-MLV) genome (a mpknot). In some embodiments, the secondary structure comprises a nucleotide sequence selected from the group consisting of GGGUCAGGAGCCCCCCCCCUGAACCCAGGAUAACCCUCAAAGUCGGGGGGCAAC C (SEQ ID NO: 6038), GUCAGGGUCAGGAGCCCCCCCCCUGAACCCAGGAUAACCCUCAAAGUCGGGGGG CAACCC (SEQ ID NO: 371), GGGUCAGGAGCCCCCCCCCUGAACCCAGGAAAACCCUCAAAGUCGGGGGGCAAC CC (SEQ ID NO: 6039), GGGUCAGGAGCCCCCCCCCUGCACCCAGGAAAACCCUCAAAGUCGGGGGGCAACC C (SEQ ID NO: 6040), GGGUCAGGAGCCCCCCCCCUGCACCCAGGAUAACCCUCAAAGUCGGGGGGCAACC C (SEQ ID NO: 6041), GUCAGGGUCAGGAGCCCCCCCCCUGAACCCAGGAAAACCCUCAAAGUCGGGGGG CAACCC (SEQ ID NO: 372), GUCAGGGUCAGGAGCCCCCCCCCUGCACCCAGGAAAACCCUCAAAGUCGGGGGG CAACCC (SEQ ID NO: 373), and GGGUCAGGAGCCCCCCCCCUGAACCCAGGAUAACCCUCAAAGUCGGGGGGC (SEQ ID NO: 374), or a nucleotide sequence having at least 80%, 85%, 90%, 95%, 96%, 97%, 98%, or 99% sequence identity therewith. In some embodiments, the secondary structure comprises a nucleotide sequence of GGGUCAGGAGCCCCCCCCCUGAACCCAGGAUAACCCUCAAAGUCGGGGGGC (SEQ ID NO: 375), or a nucleotide sequence having at least 80%, 85%, 90%, 95%, 96%, 97%, 98%, or 99% sequence identity therewith.

[0262] In some embodiments, the secondary structure comprises a quadruplex. In some embodiments, the secondary structure comprises a G-quadruplex. In some embodiments, the secondary structure comprises a nucleotide sequence selected from the group consisting of gq2 (UGGUGGUGGUGGU) (SEQ ID NO: 376), stk40 (GGGACAGGGCAGGGACAGGG) (SEQ ID NO: 377), apc2 (GGGUCCGGGUCUGGGUCUGGG) (SEQ ID NO: 378), stard3 (GGGCAGGGUCUGGGCUGGG) (SEQ ID NO: 379), Uns1 (GGGCUGGGAUGGGAAAGGG) (SEQ ID NO: 380), ceacam4 (GGGCUCUGGGUGGGCCGGG) (SEQ ID NO: 381), erc1 (GGGCUGGGCUGGGCAGGG) (SEQ ID NO: 382), pitpnm3 (GGGUGGGCUGGGAAGGG) (SEQ ID NO: 383), rlf (GGGAGGGAGGGCUAGGG) (SEQ ID NO: 384), ube3c (GGGCAGGGCUGGGAGGG) (SEQ ID NO: 385), taf15 (GGGUGGGAGGGCUGGG) (SEQ ID NO: 386), and xml (GCGUAACCUCCAUCCGAGUUGCAAGAGAGGGAAACGCAGUCUC) (SEQ ID NO: 387), or a nucleotide sequence having at least 80%, 85%, 90%, 95%, 96%, 97%, 98%, or 99% sequence identity therewith.

[0263] In some embodiments, the secondary structure comprises aP4-P6 domain of a Group I intron. In some embodiments, the secondary structure comprises the nucleotide sequence of GGAAUUGCGGGAAAGGGGUCAACAGCCGUUCAGUACCAAGUCUCAGGGGAAA CUUUGAGAUGGCCUUGCAAAGGGUAUGGUAAUAAGCUGACGGACAUGGUCCU AACCACGCAGCCAAGUCCUAAGUCAACAGAUCUUCUGUUGAUAUGGAUGCAGU UCA (SEQ ID NO: 388), or a nucleotide sequence having at least 80%, 85%, 90%, 95%, 96%, 97%, 98%, or 99% sequence identity therewith.

[0264] In some embodiments, the secondary structure comprises a riboswitch aptamer. In some embodiments, the secondary structure comprises a riboswitch aptamer derived from a prequeosine-1 riboswitch aptamer. In some embodiments, the secondary structure comprises a modified prequeosine-1 riboswitch aptamer. In some embodiments, the secondary structure comprises a nucleotide sequence selected from the group consisting of UUGACGCGGUUCUAUCUAGUUACGCGUUAAACCAACUAGAAA (SEQ ID NO: 389), UUGACGCGGUUCUAUCUACUUACGCGUUAAACCAACUAGAAA (SEQ ID NO: 390), CGCGAGUCUAGGGGAUAACGCGUUAAACUUCCUAGAAGGCGGUU (SEQ ID NO: 391), CGCGGAUCUAGAUUGUAACGCGUUAAACCAUCUAGAAGGCGGUU (SEQ ID NO: 392), CGCGUCGCUACCGCCCGGCGCGUUAAACACACUAGAAGGCGGUU (SEQ ID NO: 393), and CGCGGUUCUAUCUAGUUACGCGUUAAACCAACUAGAA (SEQ ID NO: 394), or a nucleotide sequence having at least 80%, 85%, 90%, 95%, 96%, 97%, 98%, or 99% sequence identity therewith. In some embodiments, the secondary structure comprises a nucleotide sequence selected from the group consisting of UUGACGCGGUUCUAUCUAGUUACGCGUUAAACCAACUAGAAA (SEQ ID NO: 389), CGCGAGUCUAGGGGAUAACGCGUUAAACUUCCUAGAAGGCGGUU (SEQ ID NO: 391), CGCGGAUCUAGAUUGUAACGCGUUAAACCAUCUAGAAGGCGGUU (SEQ ID NO: 392), CGCGUCGCUACCGCCCGGCGCGUUAAACACACUAGAAGGCGGUU (SEQ ID NO: 393), and CGCGGUUCUAUCUAGUUACGCGUUAAACCAACUAGAA (SEQ ID NO: 394), or a nucleotide sequence having at least 80%, 85%, 90%, 95%, 96%, 97%, 98%, or 99% sequence identity therewith. In some embodiments, the secondary structure comprises a nucleotide sequence of and CGCGGUUCUAUCUAGUUACGCGUUAAACCAACUAGAA (SEQ ID NO: 394), or a nucleotide sequence having at least 80%, 85%, 90%, 95%, 96%, 97%, 98%, or 99% sequence identity therewith.

[0265] In some embodiments, the secondary structure is linked to one or more other component of a PEgRNA via a linker. For example, in some embodiments, the secondary structure is at the 3′ end of the PEgRNA and is linked to the 3′ end of a PBS via a linker. In some embodiments, the secondary structure is at the 5′ end of the PEgRNA and is linked to the 5′ end of a spacer via a linker. In some embodiments, the linker is a nucleotide linker that is 1, 2, 3, 4, 5, 6, 7, 8, 9, 10, 11, 12, 13, 14, 15, 16, 17, 18, 19, 20, 21, 22, 23, 24, 25, 26, 27, 28, 29, 30, 31, 32, 33, 34, 35, 36, 37, 38, 39, 40, 41, 42, 43, 44, 45, 46, 47, 48, 49, or 50 nucleotides in length. In some embodiments, the linker is 5 to 10 nucleotides in length. In some embodiments, the linker is 10 to 20 nucleotides in length. In some embodiments, the linker is 15 to 25 nucleotides in length. In some embodiments, the linker is 8 nucleotides in length.

[0266] In some embodiments, the linker is designed to minimize base pairing between the linker and another component of the PEgRNA. In some embodiments, the linker is designed to minimize base pairing between the linker and the spacer. In some embodiments, the linker is designed to minimize base pairing between the linker and the PBS. In some embodiments, the linker is designed to minimize base pairing between the linker and the editing template. In some embodiments, the linker is designed to minimize base pairing between the linker and the sequence of the RNA secondary structure. In some embodiments, the linker is optimized to minimize base pairing between the linker and another component of the PEgRNA, in order of the following priority: spacer, PBS, editing template and then scaffold. In some embodiments, base paring probability is calculated using ViennaRNA 2.0 under standard parameters (37° C., 1 M NaCl, 0.05 M MgCl2).

[0267] In some embodiments, the PEgRNA comprises a RNA secondary structure and/or a linker disclosed in Nelson et al. Engineered pegRNAs improve prime editing efficiency. Nat Biotechnol. (2021), the entirety of which is incorporated herein by reference.

[0268] In some embodiments, a PEgRNA is transcribed from a nucleotide encoding the PEgRNA, for example, a DNA plasmid encoding the PEgRNA. In some embodiments, the PEgRNA comprises a self-cleaving element. In some embodiments, the self-cleaving element improves transcription and/or processing of the PEgRNA when transcribed form the nucleotide encoding the PEgRNA. In some embodiments, the PEgRNA comprises a hairpin or a RNA quadruplex. In some embodiments, the PEgRNA comprises a self-cleaving ribozyme element, for example, a hammerhead, a pistol, a hatchet, a hairpin, a VS, a twister, or a twister sister ribozyme. In some embodiments, the PEgRNA comprises a HDV ribozyme. In some embodiments, the PEgRNA comprises a hairpin recognized by Csy4. In some embodiments, the PEgRNA comprises an ENE motif. In some embodiments, the PEgRNA comprises an element for nuclear expression (ENE) from MALAT1 Inc RNA. In some embodiments, the PEgRNA comprises an ENE element from Kaposi's sarcoma-associated herpesvirus (KSHV). In some embodiments, the PEgRNA comprises a 3′ box of a U1 snRNA. In some embodiments, the PEgRNA forms a circular RNA.

[0269] In some embodiments, the PEgRNA comprises a RNA secondary structure or a motif that improves binding to the DNA-RNA duple or enhances PEgRNA activity. In some embodiments, the PEgRNA comprises a sequence derived from a native nucleotide element involved in reverse transcription, e.g., initiation of retroviral transcription. In some embodiments, the PEgRNA comprises a sequence of, or derived from, a primer binding site of a substrate of a reverse transcriptase, a polypurine tract (PPT), or a kissing loop. In some embodiments, the PEgRNA comprises a dimerization motif, a kissing loop, or a GNRA tetraloop-tetraloop receptor pair that results in circularization of the PEgRNA. In some embodiments, the PEgRNA comprises a RNA secondary structure of a motif that results in physical separation of the spacer and the PBS of the PEgRNA, thereby prevents occlusion of the spacer and improves PEgRNA activity. In some embodiments, the PEgRNA comprises a secondary structure or motif, e.g., a 5′ or 3′ extension in the spacer region that form a toehold or hairpin, wherein the secondary structure or motif competes favorably against annealing between the spacer and the PBS of the PEgRNA, thereby prevents occlusion of the spacer and improves PEgRNA activity.

[0270] In some embodiments, a PEgRNA comprises the sequence GGCCGGCAUGGUCCCAGCCUCCUCGCUGGCGCCGGCUGGGCAACAUGCUUCGG CAUGGCGAAUGGGAC (SEQ ID NO: 395) at the 3′ end. In some embodiments, a PEgRNA comprises the structure [spacer]—[gRNA core]—[editing template]—[PBS]—GGCCGGCAUGGUCCCAGCCUCCUCGCUGGCGCCGGCUGGGCAACAUGCUUCGG CAUGGCGAAUGGGAC (SEQ ID NO: 395), or [spacer]—[gRNA core]—[editing template]—[PBS]—GGCCGGCAUGGUCCCAGCCUCCUCGCUGGCGCCGGCUGGGCAACAUGCUUCGG CAUGGCGAAUGGGAC-(U)n, wherein n is an integer between 3 and 7 (SEQ ID NO: 6120). The structure derived from hepatitis D virus (HDV) is italicized.

[0271] In some embodiments, the PEgRNA comprises the sequence GGUGGGAGACGUCCCACC (SEQ ID NO: 396) at the 5′ end and/or the sequence UGGGAGACGUCCCACC (SEQ ID NO: 397) at the 3′ end. In some embodiments, the PEgRNA comprises the following structure (M-MLV kissing loop): GGUGGGAGACGUCCCACC (SEQ ID NO: 396)—[spacer]—[gRNA core]—[editing template]—[PBS]—UGGGAGACGUCCCACC (SEQ ID NO: 397), or GGUGGGAGACGUCCCACC (SEQ ID NO: 396)—[spacer]—[gRNA core]—[editing template]—[PBS]—UGGGAGACGUCCCACC-(U)n, wherein n is an integer between 3 and 7 (SEQ ID NO: 6069). The kissing loop structure is italicized.

[0272] In some embodiments, the PEgRNA comprises the sequence GAGCAGCAUGGCGUCGCUGCUCAC (SEQ ID NO: 398) at the 5′ end and/or the sequence CCAUCAGUUGACACCCUGAGG (SEQ ID NO: 399) at the 3′ end. In some embodiments, the PEgRNA comprises the following structure (VS ribozyme kissing loop): GAGCAGCAUGGCGUCGCUGCUCAC (SEQ ID NO: 398)—[spacer]—[gRNA core]—[editing template]—[PBS]—CCAUCAGUUGACACCCUGAGG (SEQ ID NO: 399), or GAGCAGCAUGGCGUCGCUGCUCAC (SEQ ID NO: 398)—[spacer]—[gRNA core]—[editing template]—[PBS]—CCAUCAGUUGACACCCUGAGG-(U)n, wherein n is an integer between 3 and 7 (SEQ ID NO: 6121).

[0273] In some embodiments, the PEgRNA comprises the sequence GCAGACCUAAGUGGUGACAUAUGGUCUG (SEQ ID NO: 400) at the 5′ end and/or the sequence CAUGCGAUUAGAAAUAAUCGCAUG (SEQ ID NO: 401) at the 3′ end. In some embodiments, the PEgRNA comprises the following structure (tetraloop and receptor): GCAGACCUAAGUGGUGACAUAUGGUCUG (SEQ ID NO: 400)—[spacer]—[gRNA core]—[editing template]—[PBS]—CAUGCGAUUAGAAAUAAUCGCAUG (SEQ ID NO: 401), or GCAGACCUAAGUGGUGACAUAUGGUCUG (SEQ ID NO: 400)—[spacer]—[gRNA core]—[editing template]—[PBS]—CAUGCGAUUAGAAAUAAUCGCAUG-(U)n (SEQ ID NO: 6122), wherein n is an integer between 3 and 7. The tetraloop/tetraloop recepter structure is italicized.

[0274] In some embodiments, the PEgRNA comprises the sequence GGCCGGCAUGGUCCCAGCCUCCUCGCUGGCGCCGGCUGGGCAACAUGCUUCGG CAUGGCGAAUGGGAC (SEQ ID NO: 395) or UCUGCCAUCAAAGCUGCGACCGUGCUCAGUCUGGUGGGAGACGUCCCACCGGC CGGCAUGGUCCCAGCCUCCUCGCUGGCGCCGGCUGGGCAACAUGCUUCGGCAU GGCGAAUGGGAC (SEQ ID NO: 6074) at the 3′ end.

[0275] In some embodiments, a PEgRNA comprises a gRNA core that comprises a modified direct repeat compared to the sequence of a naturally occurring CRISPR-Cas guide RNA scaffold, for example, a Cas9 gRNA scaffold. In some embodiments, the PEgRNA comprises a “flip and extension (F+E)” gRNA core, wherein one or more base pairs in a direct repeat is modified. In some embodiments, the PEgRNA comprises a first direct repeat (the first paring element or the lower stem), wherein a Uracil is changed to a Adenine (such that in the stem region, a U-A base pair is changed to a A-U base pair). In some embodiments, the PEgRNA comprises a first direct repeat wherein the fourth U-A base pair in the stem is changed to a A-U base pair. In some embodiments, the PEgRNA comprises a first direct repeat wherein one or more U-A base pair is changed to a G-C or C-G base pair. For example, in some embodiments, the PEgRNA comprises a first direct repeat comprising a modification to a GUUUU-AAAAC pairing element, wherein one or more of the U-A base pairs is changed to a A-U base pair, a G-C base pair, or a C-G base pair. In some embodiments, the PEgRNA comprises an extended first direct repeat.

[0276] In some embodiments, a PEgRNA comprises a gRNA core comprises the sequence

(SEQ ID NO: 403)
GUUUUAGAGCUAUACGUAGCAAGUUAAAAUAAGGCUAGUCCGUUAUCAA
CUUUACGAAGUGGCACCGAGUCGGUGC
or
(SEQ ID NO: 6075)
GUUUUAGAGCUAUACGUAGCAAGUUAAAAUAAGGCUAGUCCGUUAUCAA
CUUUACGAAGUGGGACCGAGUCGGUCC.

[0277] In some embodiments, a PEgRNA comprises a gRNA core comprising the sequence

(SEQ ID NO: 404)
GUUUUAGAGCUAGCUCAUGAAAAUGAGCUAGCAAGUUAAAAUAAGGCUA
GUCCGUUAUCAACUUGAAAAAGUGGGACCGAGUCGGUCC.

[0278] In some embodiments, a PEgRNA comprises a gRNA core comprising the sequence

(SEQ ID NO: 6036)
GUUUGAGAGCUAGAAAUAGCAAGUUUAAAUAAGGCUAGUCCGUUAUCAA
CUUGAAAAAGUGGGACCGAGUCGGUCC.

[0279] In some embodiments, a PEgRNA comprises a gRNA core comprising the sequence

(SEQ ID NO: 405)
GUUUAAGAGCUAGAAAUAGCAAGUUUAAAUAAGGCUAGUCCGUUAUCAA
CUUGAAAAAGUGGCACCGAGUCGGUGC.

[0280] In some embodiments, a PEgRNA comprises a gRNA core comprising the sequence

(SEQ ID NO: 406)
GUUUUAGAGCUAUGCUGGAAACAGCAUAGCAAGUUAAAAUAAGGCUAGU
CCGUUAUCAACUUGAAAAAGUGGCACCGAGUCGGUGC.

[0281] In some embodiments, a PEgRNA comprises a gRNA core comprising the sequence

(SEQ ID NO: 56)
GUUUAAGAGCUAUGCUGGAAACAGCAUAGCAAGUUUAAAUAAGGCUAGU
CCGUUAUCAACUUGAAAAAGUGGCACCGAGUCGGUGC.

[0282] In some embodiments, a PEgRNA or a nick guide RNA (ngRNA) may be chemically synthesized, or may be assembled or cloned and transcribed from a DNA sequence, e.g., a plasmid DNA sequence, or by any RNA oligonucleotide synthesis method known in the art. In some embodiments, DNA sequence that encodes a PEgRNA (or ngRNA) may be designed to append one or more nucleotides at the 5′ end or the 3′ end of the PEgRNA (or nick guide RNA) encoding sequence to enhance PEgRNA transcription. For example, in some embodiments, a DNA sequence that encodes a PEgRNA (or nick guide RNA) (or an ngRNA) may be designed to append a nucleotide G at the 5′ end. Accordingly, in some embodiments, the PEgRNA (or nick guide RNA) may comprise an appended nucleotide G at the 5′ end. In some embodiments, a DNA sequence that encodes a PEgRNA (or nick guide RNA) may be designed to append a sequence that enhances transcription, e.g., a Kozak sequence, at the 5′ end. In some embodiments, a DNA sequence that encodes a PEgRNA (or nick guide RNA) may be designed to append the sequence CACC or CCACC at the 5′ end. Accordingly, in some embodiments, the PEgRNA (or nick guide RNA) may comprise an appended sequence CACC or CCACC at the 5′ end. In some embodiments, a DNA sequence that encodes a PEgRNA (or nick guide RNA) may be designed to append the sequence TTT, TTTT, TTTTT, TTTTTT, TTTTTTT at the 3′ end. Accordingly, in some embodiments, the PEgRNA (or nick guide RNA) may comprise an appended sequence UUU, UUUU, UUUUU, UUUUUU, or UUUUUUU at the 3′ end.

[0283] In some embodiments, a prime editing system or composition further comprises a nick guide polynucleotide, such as a nick guide RNA (ngRNA). Without wishing to be bound by any particular theory, the non-edit strand of a double stranded target DNA in the target gene may be nicked by a CRISPR-Cas nickase directed by an ngRNA. In some embodiments, the nick on the non-edit strand directs endogenous DNA repair machinery to use the edit strand as a template for repair of the non-edit strand, which may increase efficiency of prime editing. In some embodiments, the non-edit strand is nicked by a prime editor localized to the non-edit strand by the ngRNA. Accordingly, also provided herein are PEgRNA systems comprising at least one PEgRNA and at least one ngRNA.

[0284] In some embodiments, a PEgRNA or ngRNA may include a modifying sequence at the 3′end having the sequence AACAUUGACGCGUCUCUACGUGGGGGCGCG (SEQ ID NO: 57).

[0285] In some embodiments, the ngRNA is a guide RNA which contains a variable spacer sequence and a guide RNA scaffold or core region that interacts with the DNA binding domain, e.g., Cas9 of the prime editor. In some embodiments, the ngRNA comprises a spacer sequence (referred to herein as an ng spacer, or a second spacer) that is substantially complementary to a second search target sequence (or ng search target sequence), which is located on the edit strand, or the non-target strand. Thus, in some embodiments, the ng search target sequence recognized by the ng spacer and the search target sequence recognized by the spacer sequence of the PEgRNA are on opposite strands of the double stranded target DNA of target gene, e.g., the SLC37A4 gene. A prime editing system, composition, or complex comprising a ngRNA may be referred to as a “PE3” prime editing systemPE3 prime editing composition, or PE3 prime editing complex.

[0286] In some embodiments, the ng search target sequence is located on the non-target strand, within 10 base pairs to 100 base pairs of an intended nucleotide edit incorporated by the PEgRNA on the edit strand. In some embodiments, the ng target search target sequence is within 10 bp, 20 bp, 30 bp, 40 bp, 50 bp, 60 bp, 70 bp, 80 bp, 90 bp, 91 bp, 92 bp, 93 bp, 94 bp, 95 bp, 96 bp, 97 bp, 98 bp, 99 bp, or 100 bp of an intended nucleotide edit incorporated by the PEgRNA on the edit strand. In some embodiments, the 5′ ends of the ng search target sequence and the PEgRNA search target sequence are within 1, 2, 3, 4, 5, 6, 7, 8, 9, or 10 bp apart from each other. In some embodiments, the 5′ ends of the ng search target sequence and the PEgRNA search target sequence are within 10 bp, 20 bp, 30 bp, 40 bp, 50 bp, 60 bp, 70 bp, 80 bp, 90 bp, 91 bp, 92 bp, 93 bp, 94 bp, 95 bp, 96 bp, 97 bp, 98 bp, 99 bp, or 100 bp apart from each other.

[0287] In some embodiments, an ng spacer sequence is complementary to, and may hybridize with the second search target sequence only after an intended nucleotide edit has been incorporated on the edit strand, by the editing template of a PEgRNA. Such a prime editing system maybe referred to as a “PE3b” prime editing system or composition. In some embodiments, the ngRNA comprises a spacer sequence that matches only the edit strand after incorporation of the nucleotide edits, but not the endogenous target gene sequence on the edit strand. Accordingly, in some embodiments, an intended nucleotide edit is incorporated within the ng search target sequence. In some embodiments, the intended nucleotide edit is incorporated within about 1-10 nucleotides of the position corresponding to the PAM of the ng search target sequence.

[0288] A PEgRNA and/or an ngRNA of this disclosure, in some embodiments, may include modified nucleotides, e.g., chemically modified DNA or RNA nucleobases, and may include one or more nucleobase analogs (e.g., modifications which might add functionality, such as temperature resilience). In some embodiments, PEgRNAs and/or ngRNAs as described herein may be chemically modified. The phrase “chemical modifications,” as used herein, can include modifications which introduce chemistries which differ from those seen in naturally occurring DNA or RNAs, for example, covalent modifications such as the introduction of modified nucleotides, (e.g., nucleotide analogs, or the inclusion of pendant groups which are not naturally found in DNA or RNA molecules).

[0289] In some embodiments, the PEgRNAs and/or ngRNAs provided in this disclosure may have undergone a chemical or biological modifications. Modifications may be made at any position within a PEgRNA or ngRNA, and may include modification to a nucleobase or to a phosphate backbone of the PEgRNA or ngRNA. In some embodiments, chemical modifications can be a structure guided modifications. In some embodiments, a chemical modification is at the 5′ end and/or the 3′ end of a PEgRNA. In some embodiments, a chemical modification is at the 5′ end and/or the 3′ end of a ngRNA. In some embodiments, a chemical modification may be within the spacer sequence, the extension arm, the editing template sequence, or the primer binding site of a PEgRNA. In some embodiments, a chemical modification may be within the spacer sequence or the gRNA core of a PEgRNA or a ngRNA. In some embodiments, a chemical modification may be within the 3′ most nucleotides of a PEgRNA or ngRNA. In some embodiments, a chemical modification may be within the 3′ most end of a PEgRNA or ngRNA. In some embodiments, a chemical modification may be within the 5′ most end of a PEgRNA or ngRNA. In some embodiments, a PEgRNA or ngRNA comprises 1, 2, 3, 4, 5, 6, 7, 8, 9, 10 or more chemically modified nucleotides at the 3′ end. In some embodiments, a PEgRNA or ngRNA comprises 1, 2, 3, 4, 5, 6, 7, 8, 9, 10 or more chemically modified nucleotides at the 5′ end. In some embodiments, a PEgRNA or ngRNA comprises 1, 2, 3, 4, or 5 or more chemically modified nucleotides at the 3′ end. In some embodiments, a PEgRNA or ngRNA comprises 1, 2, 3, 4, or 5 more chemically modified nucleotides at the 5′ end. In some embodiments, a PEgRNA or ngRNA comprises 1, 2, or 3 or more chemically modified nucleotides at the 3′ end. In some embodiments, a PEgRNA or ngRNA comprises 1, 2, or 3 more chemically modified nucleotides at the 5′ end. In some embodiments, a PEgRNA or ngRNA comprises 1, 2, 3, 4, 5, 6, 7, 8, 9, 10 or more contiguous chemically modified nucleotides at the 3′ end. In some embodiments, a PEgRNA or ngRNA comprises 1, 2, 3, 4, 5, 6, 7, 8, 9, 10 or more contiguous chemically modified nucleotides at the 5′ end. In some embodiments, a PEgRNA or ngRNA comprises 1, 2, 3, 4, or 5 contiguous chemically modified nucleotides at the 3′ end. In some embodiments, a PEgRNA or ngRNA comprises 1, 2, 3, 4, or 5 contiguous chemically modified nucleotides at the 5′ end. In some embodiments, a PEgRNA or ngRNA comprises 1, 2, or 3 contiguous chemically modified nucleotides at the 3′ end. In some embodiments, a PEgRNA or ngRNA comprises 1, 2, or 3 contiguous chemically modified nucleotides at the 5′ end. In some embodiments, a PEgRNA or ngRNA comprises 3 contiguous chemically modified nucleotides at the 3′ end. In some embodiments, a PEgRNA or ngRNA comprises 1, 2, 3, 4, 5, or more chemically modified nucleotides near the 3′ end. In some embodiments, a PEgRNA or ngRNA comprises 3 contiguous chemically modified nucleotides at the 3′ end. In some embodiments, a PEgRNA or ngRNA comprises 3 contiguous chemically modified nucleotides at the 5′ end. In some embodiments, a PEgRNA or ngRNA comprises 1, 2, 3, 4, 5, or more chemically modified nucleotides near the 3′ end. In some embodiments, a PEgRNA or ngRNA comprises 1, 2, 3, 4, 5, or more contiguous chemically modified nucleotides near the 3′ end. In some embodiments, a PEgRNA or ngRNA comprises 1, 2, 3, 4, 5, or more chemically modified nucleotides near the 3′ end, where the 3′ most nucleotide is not modified, and the 1, 2, 3, 4, 5, or more chemically modified nucleotides precede the 3′ most nucleotide in a 5′-to-3′ order. In some embodiments, a PEgRNA or ngRNA comprises 1, 2, 3, 4, 5, 6, 7, 8, 9, 10, 11, 12, 13, 14, 15, 16, 17, 18, 19, 20, 21, 22, 23, 24, 25, 26, 27, 28, 29, 30, 31, 32, 33, 34, 35 or more chemically modified nucleotides near the 3′ end, where the 3′ most nucleotide is not modified, and the 1, 2, 3, 4, 5, 6, 7, 8, 9, 10, 11, 12, 13, 14, 15, 16, 17, 18, 19, 20, 21, 22, 23, 24, 25, 26, 27, 28, 29, 30, 31, 32, 33, 34, 35 or more chemically modified nucleotides precede the 3′ most nucleotide in a 5′-to-3′ order.

[0290] In some embodiments, a PEgRNA or ngRNA comprises one or more chemical modified nucleotides in the gRNA core. As exemplified in FIG. 4, the gRNA core of a PEgRNA may comprise one or more regions of a base paired lower stem, a base paired upper stem, where the lower stem and upper stem may be connected by a bulge comprising unpaired RNAs. The gRNA core may further comprise a nexus distal from the spacer sequence. In some embodiments, the gRNA core comprises one or more chemically modified nucleotides in the lower stem, upper stem, and/or the hairpin regions. In some embodiments, all of the nucleotides in the lower stem, upper stem, and/or the hairpin regions are chemically modified.

[0291] A chemical modification to a PEgRNA or ngRNA can comprise a 2′-O-thionocarbamate-protected nucleoside phosphoramidite, a 2′-O-methyl (M), a 2′-O-methyl 3′phosphorothioate (MS), or a 2′-O-methyl 3′thioPACE (MSP), or any combination thereof. In some embodiments, a chemically modified PEgRNA and/or ngRNA can comprise a 2′-O-methyl (M) RNA, a 2′-O-methyl 3′phosphorothioate (MS) RNA, a 2′-O-methyl 3′thioPACE (MSP) RNA, a 2′-F RNA, a phosphorothioate bond modification, any other chemical modifications known in the art, or any combination thereof. A chemical modification may also include, for example, the incorporation of non-nucleotide linkages or modified nucleotides into the PEgRNA and/or ngRNA (e.g., modifications to one or both of the 3′ and 5′ ends of a guide RNA molecule). Such modifications can include the addition of bases to an RNA sequence, complexing the RNA with an agent (e.g., a protein or a complementary nucleic acid molecule), and inclusion of elements which change the structure of an RNA molecule (e.g., which form secondary structures).

### Prime Editing Compositions

[0292] Disclosed herein, in some embodiments, are compositions, systems, and methods using a prime editing composition. The term “prime editing composition” or “prime editing system” refers to compositions involved in the method of prime editing as described herein. A prime editing composition may include a prime editor, e.g., a prime editor fusion protein, and a PEgRNA. A prime editing composition may further comprise additional elements, such as second strand nicking ngRNAs. Components of a prime editing composition may be combined to form a complex for prime editing, or may be kept separately, e.g., for administration purposes.

[0293] In some embodiments, a prime editing composition comprises a prime editor fusion protein complexed with a PEgRNA and optionally complexed with a ngRNA. In some embodiments, the prime editing composition comprises a prime editor comprising a DNA binding domain and a DNA polymerase domain associated with each other through a PEgRNA. For example, the prime editing composition may comprise a prime editor comprising a DNA binding domain and a DNA polymerase domain linked to each other by an RNA-protein recruitment aptamer RNA sequence, which is linked to a PEgRNA. In some embodiments, a prime editing composition comprises a PEgRNA and a polynucleotide, a polynucleotide construct, or a vector that encodes a prime editor fusion protein.

[0294] In some embodiments, a prime editing composition comprises a PEgRNA, a ngRNA, and a polynucleotide, a polynucleotide construct, or a vector that encodes a prime editor fusion protein. In some embodiments, a prime editing composition comprises multiple polynucleotides, polynucleotide constructs, or vectors, each of which encodes one or more prime editing composition components. In some embodiments, the PEgRNA of a prime editing composition is associated with the DNA binding domain, e.g., a Cas9 nickase, of the prime editor. In some embodiments, the PEgRNA of a prime editing composition complexes with the DNA binding domain of a prime editor and directs the prime editor to the target DNA.

[0295] In some embodiments, a prime editing composition comprises one or more polynucleotides that encode prime editor components and/or PEgRNA or ngRNAs. In some embodiments, a prime editing composition comprises a polynucleotide encoding a fusion protein comprising a DNA binding domain and a DNA polymerase domain. In some embodiments, a prime editing composition comprises (i) a polynucleotide encoding a fusion protein comprising a DNA binding domain and a DNA polymerase domain, and (ii) a PEgRNA or a polynucleotide encoding the PEgRNA. In some embodiments, a prime editing composition comprises (i) a polynucleotide encoding a fusion protein comprising a DNA binding domain and a DNA polymerase domain, (ii) a PEgRNA or a polynucleotide encoding the PEgRNA, and (iii) an ngRNA or a polynucleotide encoding the ngRNA. In some embodiments, a prime editing composition comprises (i) a polynucleotide encoding a DNA binding domain of a prime editor, e.g., a Cas9 nickase, (ii) a polynucleotide encoding a DNA polymerase domain of a prime editor, e.g., a reverse transcriptase, and (iii) a PEgRNA or a polynucleotide encoding the PEgRNA. In some embodiments, a prime editing composition comprises (i) a polynucleotide encoding a DNA binding domain of a prime editor, e.g., a Cas9 nickase, (ii) a polynucleotide encoding a DNA polymerase domain of a prime editor, e.g., a reverse transcriptase, (iii) a PEgRNA or a polynucleotide encoding the PEgRNA, and (iv) an ngRNA or a polynucleotide encoding the ngRNA.

[0296] In some embodiments, the polynucleotide encoding the DNA biding domain or the polynucleotide encoding the DNA polymerase domain further encodes an additional polypeptide domain, e.g., an RNA-protein recruitment domain, such as a MS2 coat protein domain. In some embodiments, a prime editing composition comprises (i) a polynucleotide encoding a N-terminal half of a prime editor fusion protein and an intein-N and (ii) a polynucleotide encoding a C-terminal half of a prime editor fusion protein and an intein-C. In some embodiments, a prime editing composition comprises (i) a polynucleotide encoding a N-terminal half of a prime editor fusion protein and an intein-N (ii) a polynucleotide encoding a C-terminal half of a prime editor fusion protein and an intein-C, (iii) a PEgRNA or a polynucleotide encoding the PEgRNA, and/or (iv) an ngRNA or a polynucleotide encoding the ngRNA. In some embodiments, a prime editing composition comprises (i) a polynucleotide encoding a N-terminal portion of a DNA binding domain and an intein-N, (ii) a polynucleotide encoding a C-terminal portion of the DNA binding domain, an intein-C, and a DNA polymerase domain. In some embodiments, the DNA binding domain is a Cas protein domain, e.g., a Cas9 nickase. In some embodiments, the prime editing composition comprises (i) a polynucleotide encoding a N-terminal portion of a DNA binding domain and an intein-N, (ii) a polynucleotide encoding a C-terminal portion of the DNA binding domain, an intein-C, and a DNA polymerase domain, (iii) a PEgRNA or a polynucleotide encoding the PEgRNA, and/or (iv) a ngRNA or a polynucleotide encoding the ngRNA.

[0297] In some embodiments, a prime editing system comprises one or more polynucleotides encoding one or more prime editor polypeptides, wherein activity of the prime editing system may be temporally regulated by controlling the timing in which the vectors are delivered. For example, in some embodiments, a polynucleotide encoding the prime editor and a polynucleotide encoding a PEgRNA may be delivered simultaneously. For example, in some embodiments, a polynucleotide encoding the prime editor and a polynucleotide encoding a PEgRNA may be delivered sequentially.

[0298] In some embodiments, a polynucleotide encoding a component of a prime editing system may further comprise an element that is capable of modifying the intracellular half-life of the polynucleotide and/or modulating translational control. In some embodiments, the polynucleotide is a RNA, for example, an mRNA. In some embodiments, the half-life of the polynucleotide, e.g., the RNA may be increased. In some embodiments, the half-life of the polynucleotide, e.g., the RNA may be decreased. In some embodiments, the element may be capable of increasing the stability of the polynucleotide, e.g., the RNA. In some embodiments, the element may be capable of decreasing the stability of the polynucleotide, e.g., the RNA. In some embodiments, the element may be within the 3′ UTR of the RNA. In some embodiments, the element may include a polyadenylation signal (PA). In some embodiments, the element may include a cap, e.g., an upstream mRNA or PEgRNA end. In some embodiments, the RNA may comprise no PA such that it is subject to quicker degradation in the cell after transcription.

[0299] In some embodiments, the element may include at least one AU-rich element (ARE). The AREs may be bound by ARE binding proteins (ARE-BPs) in a manner that is dependent upon tissue type, cell type, timing, cellular localization, and environment. In some embodiments the destabilizing element may promote RNA decay, affect RNA stability, or activate translation. In some embodiments, the ARE may comprise 50 to 150 nucleotides in length. In some embodiments, the ARE may comprise at least one copy of the sequence AUUUA. In some embodiments, at least one ARE may be added to the 3′ UTR of the RNA. In some embodiments, the element may be a Woodchuck Hepatitis Virus Posttranscriptional Regulatory Element (WPRE). In further embodiments, the element is a modified and/or truncated WPRE sequence that is capable of enhancing expression from the transcript. In some embodiments, the WPRE or equivalent may be added to the 3′ UTR of the RNA. In some embodiments, the element may be selected from other RNA sequence motifs that are enriched in either fast- or slow-decaying transcripts. In some embodiments, the polynucleotide, e.g., a vector, encoding the PE or the PEgRNA may be self-destroyed via cleavage of a target sequence present on the polynucleotide, e.g., a vector. The cleavage may prevent continued transcription of a PE or a PEgRNA.

[0300] Polynucleotides encoding prime editing composition components can be DNA, RNA, or any combination thereof. In some embodiments, a polynucleotide encoding a prime editing composition component is an expression construct. In some embodiments, a polynucleotide encoding a prime editing composition component is a vector. In some embodiments, the vector is a DNA vector. In some embodiments, the vector is a plasmid. In some embodiments, the vector is a virus vector, e.g., a retroviral vector, adenoviral vector, lentiviral vector, herpesvirus vector, or an adeno-associated virus vector (AAV).

[0301] In some embodiments, polynucleotides encoding polypeptide components of a prime editing composition are codon optimized by replacing at least one codon (e.g., about or more than about 1, 2, 3, 4, 5, 10, 15, 20, 25, 50, or more codons) of the native sequence with codons that are more frequently or most frequently used in the genes of that host cell while maintaining the native amino acid sequence. In some embodiments, a polynucleotide encoding a polypeptide component of a prime editing composition are operably linked to one or more expression regulatory elements, for example, a promoter, a 3′ UTR, a 5′ UTR, or any combination thereof. In some embodiments, a polynucleotide encoding a prime editing composition component is a messenger RNA (mRNA). In some embodiments, the mRNA comprises a Cap at the 5′ end and/or a poly A tail at the 3′ end.

[0302] Unless otherwise indicated, references to nucleotide positions in human chromosomes are as set forth in human genome assembly consortium Human build 38 (GRCh38), GenBank accession GCF_000001405.38.

[0303] Provided herein in some embodiments are example sequences for PEgRNAs, including PEgRNA spacers, PBS, RTT, and ngRNA spacers for a prime editing system comprising a nuclease that recognizes the PAM sequence “NG.” In some embodiments, a PAM motif on the edit strand comprises an “NG” motif, wherein N is any nucleotide.

### Pharmaceutical Compositions

[0304] Disclosed herein are pharmaceutical compositions comprising any of the prime editing composition components, for example, prime editors, fusion proteins, polynucleotides encoding prime editor polypeptides, PEgRNAs, ngRNAs, and/or prime editing complexes described herein.

[0305] The term “pharmaceutical composition”, as used herein, refers to a composition formulated for pharmaceutical use. In some embodiments, the pharmaceutical composition further comprises a pharmaceutically acceptable carrier. In some embodiments, the pharmaceutical composition comprises additional agents, e.g., for specific delivery, increasing half-life, or other therapeutic compounds.

[0306] In some embodiments, a pharmaceutically-acceptable carrier comprises any vehicle, such as a liquid or solid filler, diluent, excipient, manufacturing aid (e.g., lubricant, talc magnesium, calcium or zinc stearate, or steric acid), or solvent encapsulating material, involved in carrying or transporting the compound from one site (e.g., the delivery site) of the body, to another site (e.g., organ, tissue or portion of the body). A pharmaceutically acceptable carrier is “acceptable” in the sense of being compatible with the other ingredients of the formulation and not injurious to the tissue of the subject (e.g., physiologically compatible, sterile, physiologic pH, etc.)

[0307] Formulations of the pharmaceutical compositions described herein can be prepared by any method known or hereafter developed in the art of pharmacology. In general, such preparatory methods include the step of bringing the active ingredient(s) into association with an excipient and/or one or more other accessory ingredients, and then, if necessary and/or desirable, shaping and/or packaging the product into a desired single- or multi-dose unit. Pharmaceutical formulations can additionally comprise a pharmaceutically acceptable excipient, which, as used herein, includes any and all solvents, dispersion media, diluents, or other liquid vehicles, dispersion or suspension aids, surface active agents, isotonic agents, thickening or emulsifying agents, preservatives, solid binders, lubricants and the like, as suited to the particular dosage form desired.

### Methods of Editing

[0308] The methods and compositions disclosed herein can be used to edit a target gene of interest by prime editing.

[0309] In some embodiments, the prime editing method comprises contacting a target gene, e.g., a SLC37A4 gene, with a PEgRNA and a prime editor (PE) polypeptide described herein. In some embodiments, the target gene is double stranded, and comprises two strands of DNA complementary to each other. In some embodiments, the contacting with a PEgRNA and the contacting with a prime editor are performed sequentially. In some embodiments, the contacting with a prime editor is performed after the contacting with a PEgRNA. In some embodiments, the contacting with a PEgRNA is performed after the contacting with a prime editor. In some embodiments, the contacting with a PEgRNA, and the contacting with a prime editor are performed simultaneously. In some embodiments, the PEgRNA and the prime editor are associated in a complex prior to contacting a target gene.

[0310] In some embodiments, contacting the target gene with the prime editing composition results in binding of the PEgRNA to a target strand of the target gene, e.g., a SLC37A4 gene. In some embodiments, contacting the target gene with the prime editing composition results in binding of the PEgRNA to a search target sequence on the target strand of the target gene upon contacting with the PEgRNA. In some embodiments, contacting the target gene with the prime editing composition results in binding of a spacer sequence of the PEgRNA to a search target sequence with the search target sequence on the target strand of the target gene upon said contacting of the PEgRNA.

[0311] In some embodiments, contacting the target gene with the prime editing composition results in binding of the prime editor to the target gene, e.g., the target SLC37A4 gene, upon the contacting of the PE composition with the target gene. In some embodiments, the DNA binding domain of the PE associates with the PEgRNA. In some embodiments, the PE binds the target gene, e.g., a SLC37A4 gene, directed by the PEgRNA. Accordingly, in some embodiments, the contacting of the target gene result in binding of a DNA binding domain of a prime editor of the target SLC37A4 gene directed by the PEgRNA.

[0312] In some embodiments, contacting the target gene with the prime editing composition results in a nick in an edit strand of the target gene, e.g., a SLC37A4 gene by the prime editor upon contacting with the target gene, thereby generating a nicked on the edit strand of the target gene. In some embodiments, contacting the target gene with the prime editing composition results in a single-stranded DNA comprising a free 3′ end at the nick site of the edit strand of the target gene. In some embodiments, contacting the target gene with the prime editing composition results in a nick in the edit strand of the target gene by a DNA binding domain of the prime editor, thereby generating a single-stranded DNA comprising a free 3′ end at the nick site. In some embodiments, the DNA binding domain of the prime editor is a Cas domain. In some embodiments, the DNA binding domain of the prime editor is a Cas9. In some embodiments, the DNA binding domain of the prime editor is a Cas9 nickase.

[0313] In some embodiments, contacting the target gene with the prime editing composition results in hybridization of the PEgRNA with the 3′ end of the nicked single-stranded DNA, thereby priming DNA polymerization by a DNA polymerase domain of the prime editor. In some embodiments, the free 3′ end of the single-stranded DNA generated at the nick site hybridizes to a primer binding site sequence (PBS) of the contacted PEgRNA, thereby priming DNA polymerization. In some embodiments, the DNA polymerization is reverse transcription catalyzed by a reverse transcriptase domain of the prime editor. In some embodiments, the method comprises contacting the target gene with a DNA polymerase, e.g., a reverse transcriptase, as a part of a prime editor fusion protein or prime editing complex (in cis), or as a separate protein (in trans).

[0314] In some embodiments, contacting the target gene with the prime editing composition generates an edited single stranded DNA that is coded by the editing template of the PEgRNA by DNA polymerase mediated polymerization from the 3′ free end of the single-stranded DNA at the nick site. In some embodiments, the editing template of the PEgRNA comprises one or more intended nucleotide edits compared to endogenous sequence of the target gene, e.g., a SLC37A4 gene. In some embodiments, the intended nucleotide edits are incorporated in the target gene, by excision of the 5′ single stranded DNA of the edit strand of the target gene generated at the nick site and DNA repair. In some embodiments, the intended nucleotide edits are incorporated in the target gene by excision of the editing target sequence and DNA repair. In some embodiments, excision of the 5′ single stranded DNA of the edit strand generated at the nick site is by a flap endonuclease. In some embodiments, the flap nuclease is FEN1. In some embodiments, the method further comprises contacting the target gene with a flap endonuclease. In some embodiments, the flap endonuclease is provided as a part of a prime editor fusion protein. In some embodiments, the flap endonuclease is provided in trans.

[0315] In some embodiments, contacting the target gene with the prime editing composition generates a mismatched heteroduplex comprising the edit strand of the target gene that comprises the edited single stranded DNA, and the unedited target strand of the target gene. Without being bound by theory, the endogenous DNA repair and replication may resolve the mismatched edited DNA to incorporate the nucleotide change(s) to form the desired edited target gene.

[0316] In some embodiments, the method further comprises contacting the target gene, e.g., a SLC37A4 gene, with a nick guide (ngRNA) disclosed herein. In some embodiments, the ngRNA comprises a spacer that binds a second search target sequence on the edit strand of the target gene. In some embodiments, the contacted ngRNA directs the PE to introduce a nick in the target strand of the target gene. In some embodiments, the nick on the target strand (non-edit strand) results in endogenous DNA repair machinery to use the edit strand to repair the non-edit strand, thereby incorporating the intended nucleotide edit in both strand of the target gene and modifying the target gene. In some embodiments, the ngRNA comprises a spacer sequence that is complementary to, and may hybridize with, the second search target sequence on the edit strand only after the intended nucleotide edit(s) are incorporated in the edit strand of the target gene.

[0317] In some embodiments, the target gene is contacted by the ngRNA, the PEgRNA, and the PE simultaneously. In some embodiments, the ngRNA, the PEgRNA, and the PE form a complex when they contact the target gene. In some embodiments, the target gene is contacted with the ngRNA, the PEgRNA, and the prime editor sequentially. In some embodiments, the target gene is contacted with the ngRNA and/or the PEgRNA after contacting the target gene with the PE. In some embodiments, the target gene is contacted with the ngRNA and/or the PEgRNA before contacting the target gene with the prime editor. In some embodiments, the target gene, e.g., a SLC37A4 gene, is in a cell.

[0318] Accordingly, also provided herein are methods of modifying a cell, such as a human cell, a human primary cell, a human iPSC-derived cell, a liver cell, a hepatocyte, a cholangiocyte, a kidney cell, a proximal tubule cell, or a Müller cell.

[0319] In some embodiments, the prime editing method comprises introducing a PEgRNA, a prime editor, and/or a ngRNA into the cell that has the target gene. In some embodiments, the prime editing method comprises introducing into the cell that has the target gene with a prime editing composition comprising a PEgRNA, a prime editor polypeptide, and/or a ngRNA. In some embodiments, the PEgRNA, the prime editor polypeptide, and/or the ngRNA form a complex prior to the introduction into the cell. In some embodiments, the PEgRNA, the prime editor polypeptide, and/or the ngRNA form a complex after the introduction into the cell. The prime editors, PEgRNA and/or ngRNAs, and prime editing complexes may be introduced into the cell by any delivery approaches described herein or any delivery approach known in the art, including ribonucleoprotein (RNPs), lipid nanoparticles (LNPs), viral vectors, non-viral vectors, mRNA delivery, and physical techniques such as cell membrane disruption by a microfluidics device. The prime editors, PEgRNA and/or ngRNAs, and prime editing complexes may be introduced into the cell simultaneously or sequentially.

[0320] In some embodiments, the prime editing method comprises introducing into the cell a PEgRNA or a polynucleotide encoding the PEgRNA, a prime editor polynucleotide encoding a prime editor polypeptide, and optionally an ngRNA or a polynucleotide encoding the ngRNA. In some embodiments, the method comprises introducing the PEgRNA or the polynucleotide encoding the PEgRNA, the polynucleotide encoding the prime editor polypeptide, and/or the ngRNA or the polynucleotide encoding the ngRNA into the cell simultaneously. In some embodiments, the method comprises introducing the PEgRNA or the polynucleotide encoding the PEgRNA, the polynucleotide encoding the prime editor polypeptide, and/or the ngRNA or the polynucleotide encoding the ngRNA into the cell sequentially. In some embodiments, the method comprises introducing the polynucleotide encoding the prime editor polypeptide into the cell before introduction of the PEgRNA or the polynucleotide encoding the PEgRNA and/or the ngRNA or the polynucleotide encoding the ngRNA. In some embodiments, the polynucleotide encoding the prime editor polypeptide is introduced into and expressed in the cell before introduction of the PEgRNA or the polynucleotide encoding the PEgRNA and/or the ngRNA or the polynucleotide encoding the ngRNA into the cell. In some embodiments, the polynucleotide encoding the prime editor polypeptide is introduced into the cell after the PEgRNA or the polynucleotide encoding the PEgRNA and/or the ngRNA or the polynucleotide encoding the ngRNA are introduced into the cell. The polynucleotide encoding the prime editor polypeptide, the PEgRNA or the polynucleotide encoding the PEgRNA, and/or the ngRNA or the polynucleotide encoding the ngRNA, may be introduced into the cell by any delivery approaches described herein or any delivery approach known in the art, for example, by RNPs, LNPs, viral vectors, non-viral vectors, mRNA delivery, and physical delivery.

[0321] In some embodiments, the polynucleotide encoding the prime editor polypeptide, the polynucleotide encoding the PEgRNA, and/or the polynucleotide encoding the ngRNA integrate into the genome of the cell after being introduced into the cell. In some embodiments, the polynucleotide encoding the prime editor polypeptide, the polynucleotide encoding the PEgRNA, and/or the polynucleotide encoding the ngRNA are introduced into the cell for transient expression. Accordingly, also provided herein are cells modified by prime editing.

[0322] In some embodiments, the cell is a prokaryotic cell. In some embodiments, the cell is a eukaryotic cell. In some embodiments, the cell is a mammalian cell. In some embodiments, the cell is a non-human primate cell, bovine cell, porcine cell, rodent or mouse cell. In some embodiments, the cell is a human cell.

[0323] In some embodiments, the cell is a progenitor cell. In some embodiments, the cell is a stem cell. in some embodiments, the cell is an induced pluripotent stem cell. In some embodiments, the cell is an embryonic stem cell. In some embodiments, the cell is a retinal progenitor cell. In some embodiments, the cell is a retina precursor cell. In some embodiments, the cell is a fibroblast.

[0324] In some embodiments, the cell is a human progenitor cell. In some embodiments, the cell is a human stem cell. in some embodiments, the cell is an induced human pluripotent stem cell. In some embodiments, the cell is a human embryonic stem cell. In some embodiments, the cell is a human retinal progenitor cell. In some embodiments, the cell is a human retina precursor cell. In some embodiments, the cell is a human fibroblast.

[0325] In some embodiments, the cell is a primary cell. In some embodiments, the cell is a human primary cell. In some embodiments, the cell is a liver cell. In some embodiments, the cell is a hepatocyte. In some embodiments, the cell is a cholangiocyte. In some embodiments, the cell is a kidney cell. In some embodiments, the cell is a proximal tubule cell. In some embodiments, the cell is a Müller cell. In some embodiments, the cell is a primary human hepatocyte derived from an induced human pluripotent stem cell (iPSC). In some embodiments, the cell is a primary human cholangiocyte derived from an induced human pluripotent stem cell (iPSC). In some embodiments, the cell is a primary human renal proximal tubule cell derived from an induced human pluripotent stem cell (iPSC). In some embodiments, the cell is a primary human Müller cell derived from an induced human pluripotent stem cell (iPSC).

[0326] In some embodiments, the target gene edited by prime editing is in a chromosome of the cell. In some embodiments, the intended nucleotide edits incorporate in the chromosome of the cell and are inheritable by progeny cells. In some embodiments, the intended nucleotide edits introduced to the cell by the prime editing compositions and methods are such that the cell and progeny of the cell also include the intended nucleotide edits. In some embodiments, the cell is autologous, allogeneic, or xenogeneic to a subject. In some embodiments, the cell is from or derived from a subject. In some embodiments, the cell is from or derived from a human subject. In some embodiments, the cell is introduced back into the subject, e.g., a human subject, after incorporation of the intended nucleotide edits by prime editing.

[0327] In some embodiments, the method provided herein comprises introducing the prime editor polypeptide or the polynucleotide encoding the prime editor polypeptide, the PEgRNA or the polynucleotide encoding the PEgRNA, and/or the ngRNA or the polynucleotide encoding the ngRNA into a plurality or a population of cells that comprise the target gene. In some embodiments, the population of cells is of the same cell type. In some embodiments, the population of cells is of the same tissue or organ. In some embodiments, the population of cells is heterogeneous. In some embodiments, the population of cells is homogeneous. In some embodiments, the population of cells is from a single tissue or organ, and the cells are heterogeneous. In some embodiments, the introduction into the population of cells is ex vivo. In some embodiments, the introduction into the population of cells is in vivo, e.g., into a human subject.

[0328] In some embodiments, the target gene is in a genome of each cell of the population. In some embodiments, introduction of the prime editor polypeptide or the polynucleotide encoding the prime editor polypeptide, the PEgRNA or the polynucleotide encoding the PEgRNA, and/or the ngRNA or the polynucleotide encoding the ngRNA results in incorporation of one or more intended nucleotide edits in the target gene in at least one of the cells in the population of cells. In some embodiments, introduction of the prime editor polypeptide or the polynucleotide encoding the prime editor polypeptide, the PEgRNA or the polynucleotide encoding the PEgRNA, and/or the ngRNA or the polynucleotide encoding the ngRNA results in incorporation of the one or more intended nucleotide edits in the target gene in a plurality of the population of cells. In some embodiments, introduction of the prime editor polypeptide or the polynucleotide encoding the prime editor polypeptide, the PEgRNA or the polynucleotide encoding the PEgRNA, and/or the ngRNA or the polynucleotide encoding the ngRNA results in incorporation of the one or more intended nucleotide edits in the target gene in each cell of the population of cells. In some embodiments, introduction of the prime editor polypeptide or the polynucleotide encoding the prime editor polypeptide, the PEgRNA or the polynucleotide encoding the PEgRNA, and/or the ngRNA or the polynucleotide encoding the ngRNA results in incorporation of the one or more intended nucleotide edits in the target gene in sufficient number of cells such that the disease or disorder is treated, prevented or ameliorated.

[0329] In some embodiments, editing efficiency of the prime editing compositions and method described herein can be measured by calculating the percentage of edited target genes in a population of cells introduced with the prime editing composition. In some embodiments, the editing efficiency is determined after 1 hour, 2 hours, 6 hours, 12 hours, 24 hours, 36 hours, 48 hours, 3 days, 4 days, 5 days, 7 days, 10 days, or 14 days of exposing a target gene (e.g., a SLC37A4 gene within the genome of a cell) to a prime editing composition. In some embodiments, the population of cells introduced with the prime editing composition is ex vivo. In some embodiments, the population of cells introduced with the prime editing composition is in vitro. In some embodiments, the population of cells introduced with the prime editing composition is in vivo. In some embodiments, the prime editing methods disclosed herein have an editing efficiency of at least about 1%, at least about 5%, at least about 10%, at least about 20%, at least about 30%, at least about 40%, at least about 50%, at least about 60%, at least about 70%, at least about 80%, at least about 90%, at least about 95%, or at least about 99% relative to a suitable control. In some embodiments, the prime editing methods disclosed herein have an editing efficiency of at least 25% relative to a suitable control. In some embodiments, the prime editing methods disclosed herein have an editing efficiency of at least 35% relative to a suitable control. prime editing method disclosed herein has an editing efficiency of at least 30% relative to a suitable control. In some embodiments, the prime editing methods disclosed herein have an editing efficiency of at least 45% relative to a suitable control. In some embodiments, the prime editing methods disclosed herein have an editing efficiency of at least 50% relative to a suitable control.

[0330] In some embodiments, the methods disclosed herein have an editing efficiency of at least about 1%, at least about 5%, at least about 7.5%, at least about 10%, at least about 15%, at least about 20%, at least about 30%, at least about 40%, at least about 50%, at least about 60%, at least about 70%, at least about 80%, at least about 90%, or at least about 95% of editing a primary cell relative to a suitable control.

[0331] In some embodiments, the methods disclosed herein have an editing efficiency of at least about 5%, at least about 7.5%, at least about 10%, at least about 15%, at least about 20%, at least about 30%, at least about 40%, at least about 50%, at least about 60%, at least about 70%, at least about 80%, at least about 90%, or at least about 95% of editing a hepatocyte relative to a corresponding control hepatocyte. In some embodiments, the hepatocyte is a human hepatocyte.

[0332] In some embodiments, the prime editing compositions provided herein are capable of incorporated one or more intended nucleotide edits without generating a significant proportion of indels. The term “indel(s)”, as used herein, refers to the insertion or deletion of a nucleotide base within a polynucleotide, for example, a target gene. Such insertions or deletions can lead to frame shift mutations within a coding region of a gene. Indel frequency of editing can be calculated by methods known in the art. In some embodiments, indel frequency can be calculated based on sequence alignment such as the CRISPResso 2 algorithm as described in Clement et al., Nat. Biotechnol. 37 (3): 224-226 (2019), which is incorporated herein in its entirety. In some embodiments, the methods disclosed herein can have an indel frequency of less than 20%, less than 10%, less than 9%, less than 8%, less than 7%, less than 6%, less than 5%, less than 4%, less than 3%, less than 2%, less than 1.5%, or less than 1%. In some embodiments, any number of indels is determined after at least 1 hour, at least 2 hours, at least 6 hours, at least 12 hours, at least 24 hours, at least 36 hours, at least 48 hours, at least 3 days, at least 4 days, at least 5 days, at least 7 days, at least 10 days, or at least 14 days of exposing a target gene (e.g., a SLC37A4 gene within the genome of a cell) to a prime editing composition.

[0333] In some embodiments, the prime editing compositions provided herein are capable of incorporated one or more intended nucleotide edits efficiently without generating a significant proportion of indels. In some embodiments, the prime editing methods disclosed herein have an editing efficiency of at least about 1% and an indel frequency of less than 1% in a target cell, e.g., a human primary cell, human iPSC, human fibroblast, human hepatocyte, human cholangiocyte, human proximal tubule cell, or human Müller cell. In some embodiments, the prime editing methods disclosed herein have an editing efficiency of at least about 1% and an indel frequency of less than 0.5% in a target cell, e.g., a human primary cell, human iPSC, human fibroblast, human hepatocyte, human cholangiocyte, human proximal tubule cell, or human Müller cell. In some embodiments, the prime editing methods disclosed herein have an editing efficiency of at least about 1% and an indel frequency of less than 0.1% in a target cell, e.g., a human primary cell, human iPSC, human fibroblast, human hepatocyte, human cholangiocyte, human proximal tubule cell, or human Müller cell. In some embodiments, the prime editing methods disclosed herein have an editing efficiency of at least about 5% and an indel frequency of less than 1% in a target cell, e.g., a human primary cell, human iPSC, human fibroblast, human hepatocyte, human cholangiocyte, human proximal tubule cell, or human Müller cell. In some embodiments, the prime editing methods disclosed herein have an editing efficiency of at least about 5% and an indel frequency of less than 0.5% in a target cell, e.g., a human primary cell, human iPSC, human fibroblast, human hepatocyte, human cholangiocyte, human proximal tubule cell, or human Müller cell. In some embodiments, the prime editing methods disclosed herein have an editing efficiency of at least about 5% and an indel frequency of less than 0.1% in a target cell, e.g., a human primary cell, human iPSC, human fibroblast, human hepatocyte, human cholangiocyte, human proximal tubule cell, or human Müller cell.

[0334] In some embodiments, the prime editing methods disclosed herein have an editing efficiency of at least about 7.5% and an indel frequency of less than 1% in a target cell, e.g., a human primary cell, human iPSC, human fibroblast, human hepatocyte, human cholangiocyte, human proximal tubule cell, or human Müller cell. In some embodiments, the prime editing methods disclosed herein have an editing efficiency of at least about 7.5% and an indel frequency of less than 0.5% in a target cell, e.g., a human primary cell, human iPSC, human fibroblast, human hepatocyte, human cholangiocyte, human proximal tubule cell, or human Müller cell. In some embodiments, the prime editing methods disclosed herein have an editing efficiency of at least about 7.5% and an indel frequency of less than 0.1% in a target cell, e.g., a human primary cell, human iPSC, human fibroblast, human hepatocyte, human cholangiocyte, human proximal tubule cell, or human Müller cell.

[0335] In some embodiments, the prime editing methods disclosed herein have an editing efficiency of at least about 10% and an indel frequency of less than 1% in a target cell, e.g., a human primary cell, human iPSC, human fibroblast, human hepatocyte, human cholangiocyte, human proximal tubule cell, or human Müller cell. In some embodiments, the prime editing methods disclosed herein have an editing efficiency of at least about 10% and an indel frequency of less than 0.5% in a target cell, e.g., a human primary cell, human iPSC, human fibroblast, human hepatocyte, human cholangiocyte, human proximal tubule cell, or human Müller cell. In some embodiments, the prime editing methods disclosed herein have an editing efficiency of at least about 10% and an indel frequency of less than 0.1% in a target cell, e.g., a human primary cell, human iPSC, human fibroblast, human hepatocyte, human cholangiocyte, human proximal tubule cell, or human Müller cell.

[0336] In some embodiments, the prime editing methods disclosed herein have an editing efficiency of at least about 15% and an indel frequency of less than 1% in a target cell, e.g., a human primary cell, human iPSC, human fibroblast, human hepatocyte, human cholangiocyte, human proximal tubule cell, or human Müller cell. In some embodiments, the prime editing methods disclosed herein have an editing efficiency of at least about 15% and an indel frequency of less than 0.5% in a target cell, e.g., a human primary cell, human iPSC, human fibroblast, human hepatocyte, human cholangiocyte, human proximal tubule cell, or human Müller cell. In some embodiments, the prime editing methods disclosed herein have an editing efficiency of at least about 15% and an indel frequency of less than 0.1% in a target cell, e.g., a human primary cell, human iPSC, human fibroblast, human hepatocyte, human cholangiocyte, human proximal tubule cell, or human Müller cell.

[0337] In some embodiments, the prime editing methods disclosed herein have an editing efficiency of at least about 20% and an indel frequency of less than 1% in a target cell, e.g., a human primary cell, human iPSC, human fibroblast, human hepatocyte, human cholangiocyte, human proximal tubule cell, or human Müller cell. In some embodiments, the prime editing methods disclosed herein have an editing efficiency of at least about 20% and an indel frequency of less than 0.5% in a target cell, e.g., a human primary cell, human iPSC, human fibroblast, human hepatocyte, human cholangiocyte, human proximal tubule cell, or human Müller cell. In some embodiments, the prime editing methods disclosed herein have an editing efficiency of at least about 20% and an indel frequency of less than 0.1% in a target cell, e.g., a human primary cell, human iPSC, human fibroblast, human hepatocyte, human cholangiocyte, human proximal tubule cell, or human Müller cell.

[0338] In some embodiments, the prime editing methods disclosed herein have an editing efficiency of at least about 30% and an indel frequency of less than 1% in a target cell, e.g., a human primary cell, human iPSC, human fibroblast, human hepatocyte, human cholangiocyte, human proximal tubule cell, or human Müller cell. In some embodiments, the prime editing methods disclosed herein have an editing efficiency of at least about 30% and an indel frequency of less than 0.5% in a target cell, e.g., a human primary cell, human iPSC, human fibroblast, human hepatocyte, human cholangiocyte, human proximal tubule cell, or human Müller cell. In some embodiments, the prime editing methods disclosed herein have an editing efficiency of at least about 30% and an indel frequency of less than 0.1% in a target cell, e.g., a human primary cell, human iPSC, human fibroblast, human hepatocyte, human cholangiocyte, human proximal tubule cell, or human Müller cell.

[0339] In some embodiments, the prime editing methods disclosed herein have an editing efficiency of at least about 40% and an indel frequency of less than 1% in a target cell, e.g., a human primary cell, human iPSC, human fibroblast, human hepatocyte, human cholangiocyte, human proximal tubule cell, or human Müller cell. In some embodiments, the prime editing methods disclosed herein have an editing efficiency of at least about 40% and an indel frequency of less than 0.5% in a target cell, e.g., a human primary cell, human iPSC, human fibroblast, human hepatocyte, human cholangiocyte, human proximal tubule cell, or human Müller cell. In some embodiments, the prime editing methods disclosed herein have an editing efficiency of at least about 40% and an indel frequency of less than 0.1% in a target cell, e.g., a human primary cell, human iPSC, human fibroblast, human hepatocyte, human cholangiocyte, human proximal tubule cell, or human Müller cell.

[0340] In some embodiments, the prime editing methods disclosed herein have an editing efficiency of at least about 50% and an indel frequency of less than 1% in a target cell, e.g., a human primary cell, human iPSC, human fibroblast, human hepatocyte, human cholangiocyte, human proximal tubule cell, or human Müller cell. In some embodiments, the prime editing methods disclosed herein have an editing efficiency of at least about 50% and an indel frequency of less than 0.5% in a target cell, e.g., a human primary cell, human iPSC, human fibroblast, human hepatocyte, human cholangiocyte, human proximal tubule cell, or human Müller cell. In some embodiments, the prime editing methods disclosed herein have an editing efficiency of at least about 50% and an indel frequency of less than 0.1% in a target cell, e.g., a human primary cell, human iPSC, human fibroblast, human hepatocyte, human cholangiocyte, human proximal tubule cell, or human Müller cell.

[0341] In some embodiments, the prime editing methods disclosed herein have an editing efficiency of at least about 60% and an indel frequency of less than 1% in a target cell, e.g., a human primary cell, human iPSC, human fibroblast, human hepatocyte, human cholangiocyte, human proximal tubule cell, or human Müller cell. In some embodiments, the prime editing methods disclosed herein have an editing efficiency of at least about 60% and an indel frequency of less than 0.5% in a target cell, e.g., a human primary cell, human iPSC, human fibroblast, human hepatocyte, human cholangiocyte, human proximal tubule cell, or human Müller cell. In some embodiments, the prime editing methods disclosed herein have an editing efficiency of at least about 60% and an indel frequency of less than 0.1% in a target cell, e.g., a human primary cell, human iPSC, human fibroblast, human hepatocyte, human cholangiocyte, human proximal tubule cell, or human Müller cell.

[0342] In some embodiments, the prime editing methods disclosed herein have an editing efficiency of at least about 70% and an indel frequency of less than 1% in a target cell, e.g., a human primary cell, human iPSC, human fibroblast, human hepatocyte, human cholangiocyte, human proximal tubule cell, or human Müller cell. In some embodiments, the prime editing methods disclosed herein have an editing efficiency of at least about 70% and an indel frequency of less than 0.5% in a target cell, e.g., a human primary cell, human iPSC, human fibroblast, human hepatocyte, human cholangiocyte, human proximal tubule cell, or human Müller cell. In some embodiments, the prime editing methods disclosed herein have an editing efficiency of at least about 70% and an indel frequency of less than 0.1% in a target cell, e.g., a human primary cell, human iPSC, human fibroblast, human hepatocyte, human cholangiocyte, human proximal tubule cell, or human Müller cell.

[0343] In some embodiments, the prime editing methods disclosed herein have an editing efficiency of at least about 80% and an indel frequency of less than 1% in a target cell, e.g., a human primary cell, human iPSC, human fibroblast, human hepatocyte, human cholangiocyte, human proximal tubule cell, or human Müller cell. In some embodiments, the prime editing methods disclosed herein have an editing efficiency of at least about 80% and an indel frequency of less than 0.5% in a target cell, e.g., a human primary cell, human iPSC, human fibroblast, human hepatocyte, human cholangiocyte, human proximal tubule cell, or human Müller cell. In some embodiments, the prime editing methods disclosed herein have an editing efficiency of at least about 80% and an indel frequency of less than 0.1% in a target cell, e.g., a human primary cell, human iPSC, human fibroblast, human hepatocyte, human cholangiocyte, human proximal tubule cell, or human Müller cell.

[0344] In some embodiments, the prime editing methods disclosed herein have an editing efficiency of at least about 90% and an indel frequency of less than 1% in a target cell, e.g., a human primary cell, human iPSC, human fibroblast, human hepatocyte, human cholangiocyte, human proximal tubule cell, or human Müller cell. In some embodiments, the prime editing methods disclosed herein have an editing efficiency of at least about 90% and an indel frequency of less than 0.5% in a target cell, e.g., a human primary cell, human iPSC, human fibroblast, human hepatocyte, human cholangiocyte, human proximal tubule cell, or human Müller cell. In some embodiments, the prime editing methods disclosed herein have an editing efficiency of at least about 90% and an indel frequency of less than 0.1% in a target cell, e.g., a human primary cell, human iPSC, human fibroblast, human hepatocyte, human cholangiocyte, human proximal tubule cell, or human Müller cell.

[0345] In some embodiments, the prime editing methods disclosed herein have an editing efficiency of at least about 95% and an indel frequency of less than 1% in a target cell, e.g., a human primary cell, human iPSC, human fibroblast, human hepatocyte, human cholangiocyte, human proximal tubule cell, or human Müller cell. In some embodiments, the prime editing methods disclosed herein have an editing efficiency of at least about 95% and an indel frequency of less than 0.5% in a target cell, e.g., a human primary cell, human iPSC, human fibroblast, human hepatocyte, human cholangiocyte, human proximal tubule cell, or human Müller cell. In some embodiments, the prime editing methods disclosed herein have an editing efficiency of at least about 95% and an indel frequency of less than 0.1% in a target cell, e.g., a human primary cell, human iPSC, human fibroblast, human hepatocyte, human cholangiocyte, human proximal tubule cell, or human Müller cell. In some embodiments, any number of indels is determined after at least 1 hour, at least 2 hours, at least 6 hours, at least 12 hours, at least 24 hours, at least 36 hours, at least 48 hours, at least 3 days, at least 4 days, at least 5 days, at least 7 days, at least 10 days, or at least 14 days of exposing a target gene (e.g., a SLC37A4 gene within the genome of a cell) to a prime editing composition. In some embodiments, the editing efficiency is determined after 1 hour, 2 hours, 6 hours, 12 hours, 24 hours, 36 hours, 48 hours, 3 days, 4 days, 5 days, 7 days, 10 days, or 14 days of exposing a target gene (e.g., a SLC37A4 gene within the genome of a cell) to a prime editing composition.

[0346] In some embodiments, the prime editing composition described herein result in less than 50%, less than 40%, less than 30%, less than 20%, less than 19%, less than 18%, less than 17%, less than 16%, less than 15%, less than 14%, less than 13%, less than 12%, less than 11%, less than 10%, less than 9%, less than 8%, less than 7%, less than 6%, less than 5%, less than 4%, less than 3%, less than 2%, less than 1%, less than 0.9%, less than 0.8%, less than 0.7%, less than 0.6%, less than 0.5%, less than 0.4%, less than 0.3%, less than 0.2%, less than 0.1%, less than 0.09%, less than 0.08%, less than 0.07%, less than 0.06%, less than 0.05%, less than 0.04%, less than 0.03%, less than 0.02%, or less than 0.01% off-target editing in a chromosome that includes the target gene. In some embodiments, off-target editing is determined after at least 1 hour, at least 2 hours, at least 6 hours, at least 12 hours, at least 24 hours, at least 36 hours, at least 48 hours, at least 3 days, at least 4 days, at least 5 days, at least 7 days, at least 10 days, or at least 14 days of exposing a target gene (e.g., a nucleic acid within the genome of a cell) to a prime editing composition.

[0347] In some embodiments, the prime editing compositions (e.g., PEgRNAs and prime editors as described herein) and prime editing methods disclosed herein can be used to edit a target SLC37A4 gene. In some embodiments, the target SLC37A4 gene comprises a mutation compared to a wild type SLC37A4 gene. In some embodiments, the mutation is associated with Glycogen storage disease type 1B. In some embodiments, the target SLC37A4 gene comprises an editing target sequence that contains the mutation associated with Glycogen storage disease type 1B. In some embodiments, the mutation is in a coding region of the target SLC37A4 gene. In some embodiments, the mutation is in an exon of the target SLC37A4 gene. In some embodiments, the prime editing method comprises contacting a target SLC37A4 gene with a prime editing composition comprising a prime editor, a PEgRNA, and/or a ngRNA. In some embodiments, contacting the target SLC37A4 gene with the prime editing composition results in incorporation of one or more intended nucleotide edits in the target SLC37A4 gene. In some embodiments, the incorporation is in a region of the target SLC37A4 gene that corresponds to an editing target sequence in the SLC37A4 gene. In some embodiments, the one or more intended nucleotide edits comprises a single nucleotide substitution, an insertion, a deletion, or any combination thereof, compared to the endogenous sequence of the target SLC37A4 gene. In some embodiments, incorporation of the one or more intended nucleotide edits results in replacement of one or more mutations with the corresponding sequence that encodes a wild type G6PT1 set forth in SEQ ID NO: 1. In some embodiments, incorporation of the one or more intended nucleotide edits results in replacement of the one or more mutations with the corresponding sequence in a wild type SLC37A4 gene. In some embodiments, incorporation of the one more intended nucleotide edits results in correction of a mutation in the target SLC37A4 gene. In some embodiments, the target SLC37A4 gene comprises an editing target sequence that contains the mutation. In some embodiments, contacting the target SLC37A4 gene with the prime editing composition results in incorporation of one or more intended nucleotide edits in the target SLC37A4 gene, which corrects the mutation in the editing target sequence (or a double stranded region comprising the editing target sequence and the complementary sequence to the editing target sequence on a target strand) in the target SLC37A4 gene. In some embodiments, the mutation is in exon 8 of the target SLC37A4 gene. In some embodiments, the mutation results in a c. 1015G->T nucleotide substitution in the sequence encoding a G6PT1 protein and a G339C amino acid substitution in the G6PT1 protein. In some embodiments, the correction results in restoration of wild type expression, i.e., G at position 1015 in the sequence encoding the G6PT1 protein, and thereby a restoration of wild type G6PT1 with glycine at position 339. In some embodiments, the mutation results in a c. 1042-1043delCT in the sequence encoding a G6PT1 protein. In some embodiments, the correction results in restoration of wild type expression, i.e., CT insertion at position 1042 in the sequence encoding the G6PT1 protein.

[0348] In some embodiments, the target SLC37A4 gene is in a target cell. Accordingly, in one aspect provided herein is a method of editing a target cell comprising a target SLC37A4 gene that encodes a polypeptide that comprises one or more mutations relative to a wild type SLC37A4 gene. In some embodiments, the methods of the present disclosure comprise introducing a prime editing composition comprising a PEgRNA, a prime editor polypeptide, and/or a ngRNA into the target cell that has the target SLC37A4 gene to edit the target SLC37A4 gene, thereby generating an edited cell. In some embodiments, the target cell is a mammalian cell. In some embodiments, the target cell is a human cell. In some embodiments, the target cell is a progenitor cell. In some embodiments, the target cell is a stem cell. in some embodiments, the target cell is an induced pluripotent stem cell. In some embodiments, the target cell is an embryonic stem cell. In some embodiments, the target cell is a retinal progenitor cell. In some embodiments, the target cell is a retina precursor cell. In some embodiments, the target cell is a fibroblast. In some embodiments, the target cell is a human progenitor cell. In some embodiments, the target cell is a human stem cell. in some embodiments, the target cell is an induced human pluripotent stem cell. In some embodiments, the target cell is a human embryonic stem cell. In some embodiments, the target cell is a human retinal progenitor cell. In some embodiments, the target cell is a human retina precursor cell. In some embodiments, the target cell is a human fibroblast. In some embodiments, the target cell is a primary cell. In some embodiments, the target cell is a human primary cell. In some embodiments, the target cell is a liver cell. In some embodiments, the target cell is a hepatocyte. In some embodiments, the target cell is a cholangiocyte. In some embodiments, the target cell is a renal proximal tubule cell. In some embodiments, the target cell is a human cell from a liver. In some embodiments, the target cell is a human hepatocyte. In some embodiments, the target cell is a human Müller cell. In some embodiments, the target cell is a human cholangiocyte. In some embodiments, the target cell is a human renal proximal tubule cell. In some embodiments, the cell is a human cell from an inner ear. In some embodiments, the cell is a primary human hepatocyte derived from an induced human pluripotent stem cell (iPSC). In some embodiments, the cell is a primary human Müller cell derived from an induced human pluripotent stem cell (iPSC). In some embodiments, components of a prime editing composition described herein are provided to a target cell in vitro. In some embodiments, components of a prime editing composition described herein are provided to a target cell ex vivo. In some embodiments, components of a prime editing composition described herein are provided to a target cell in vivo.

[0349] In some embodiments, incorporation of the one or more intended nucleotide edits in the target SLC37A4 gene that comprises one or more mutations restores wild type expression and function of G6PT1 encoded by the SLC37A4 gene. In some embodiments, the target SLC37A4 gene encodes a G339C amino acid substitution as compared to the wild type G6PT1 SLC37A4 protein prior to incorporation of the one or more intended nucleotide edits. In some embodiments, the target SLC37A4 gene encodes a L348fs amino acid frameshift mutation as compared to the wild type G6PT1 SLC37A4 protein prior to incorporation of the one or more intended nucleotide edits. In some embodiments, expression and/or function of G6PT1 may be measured when expressed in a target cell. In some embodiments, incorporation of the one or more intended nucleotide edits in the target SLC37A4 gene comprising one or more mutations lead to a fold change in a level of SLC37A4 gene expression, G6PT1 expression, or a combination thereof. In some embodiments, a change in the level of SLC37A4 expression can comprise a fold change of, e.g., 2-fold, 3-fold, 4-fold, 5-fold, 6-fold, 7-fold, 8-fold, 9-fold, 10-fold, 15-fold, 20-fold, 25-fold, 30-fold, 40-fold, 50-fold, 60-fold, 70-fold, 80-fold, 90-fold, 100-fold or greater as compared to expression in a suitable control cell not introduced with a prime editing composition described herein. In some embodiments, incorporation of the one or more intended nucleotide edits in the target SLC37A4 gene that comprises one or more mutations restores wild type expression of G6PT1 by at least 10%, 20%, 30%, 40%, 50%, 60%, 70%, 80%, 90%, 95%, 099% or more as compared to wild type expression of the SLC37A4 protein in a suitable control cell that comprises a wild type SLC37A4 gene.

[0350] In some embodiments, a G6PT1 expression increase can be measured by a G6PT1 functional assay. In some embodiments, protein expression can be measured using a protein assay. In some embodiments, protein expression can be measured using antibody testing. In some embodiments, an antibody can comprise anti-G6PT1. In some embodiments, protein expression can be measured using ELISA, mass spectrometry, Western blot, sodium dodecyl sulfate polyacrylamide gel electrophoresis (SDS-PAGE), high performance liquid chromatography (HPLC), electrophoresis, or any combination thereof.

### Methods of Treating Glycogen Storage Disease Type 1B

[0351] In some embodiments, provided herein are methods for treatment of a subject diagnosed with a disease associated with or caused by one or more pathogenic mutations that can be corrected by prime editing. In some embodiments, provided herein are methods for treating Glycogen storage disease type 1B that comprise administering to a subject a therapeutically effective amount of a prime editing composition, or a pharmaceutical composition comprising a prime editing composition as described herein. In some embodiments, administration of the prime editing composition results in incorporation of one or more intended nucleotide edits in the target gene in the subject. In some embodiments, administration of the prime editing composition results in correction of one or more pathogenic mutations, e.g., point mutations, insertions, or deletions, associated with Glycogen storage disease type 1B in the subject. In some embodiments, the target gene comprise an editing target sequence that contains the pathogenic mutation. In some embodiments, administration of the prime editing composition results in incorporation of one or more intended nucleotide edits in the target gene that corrects the pathogenic mutation in the editing target sequence (or a double stranded region comprising the editing target sequence and the complementary sequence to the editing target sequence on a target strand) of the target gene in the subject.

[0352] In some embodiments, the method provided herein comprises administering to a subject an effective amount of a prime editing composition, for example, a PEgRNA, a prime editor, and/or a ngRNA. In some embodiments, the method comprises administering to the subject an effective amount of a prime editing composition described herein, for example, polynucleotides, vectors, or constructs that encode prime editing composition components, or RNPs, LNPs, and/or polypeptides comprising prime editing composition components. Prime editing compositions can be administered to target the SLC37A4 gene in a subject, e.g., a human subject, suffering from, having, susceptible to, or at risk for Glycogen storage disease type 1B. Identifying a subject in need of such treatment can be in the judgment of a subject or a health care professional and can be subjective (e.g., opinion) or objective (e.g., measurable by a test or diagnostic method). In some embodiments, the subject has Glycogen storage disease type 1B.

[0353] In some embodiments, the subject has been diagnosed with Glycogen storage disease type 1B by sequencing of a SLC37A4 gene in the subject. In some embodiments, the subject comprises at least a copy of SLC37A4 gene that comprises one or more mutations compared to a wild type SLC37A4 gene. In some embodiments, the subject comprises at least a copy of SLC37A4 gene that comprises a mutation in a coding region of the SLC37A4 gene. In some embodiments, the subject comprises at least a copy of SLC37A4 gene that comprises a mutation in exon 8, as compared to a wild type SLC37A4 gene. In some embodiments, the subject comprises at least a copy of SLC37A4 gene that comprises mutation G339C of the SLC37A4 gene as compared to a wild type SLC37A4 gene. In some embodiments, the subject comprises at least a copy of SLC37A4 gene that comprises mutation L348fs of the SLC37A4 gene as compared to a wild type SLC37A4 gene.

[0354] In some embodiments, the method comprises directly administering prime editing compositions provided herein to a subject. The prime editing compositions described herein can be delivered with in any form as described herein, e.g., as LNPs, RNPs, polynucleotide vectors such as viral vectors, or mRNAs. The prime editing compositions can be formulated with any pharmaceutically acceptable carrier described herein or known in the art for administering directly to a subject. Components of a prime editing composition or a pharmaceutical composition thereof may be administered to the subject simultaneously or sequentially. For example, in some embodiments, the method comprises administering a prime editing composition, or pharmaceutical composition thereof, comprising a complex that comprises a prime editor fusion protein and a PEgRNA and/or a ngRNA, to a subject. In some embodiments, the method comprises administering a polynucleotide or vector encoding a prime editor to a subject simultaneously with a PEgRNA and/or a ngRNA. In some embodiments, the method comprises administering a polynucleotide or vector encoding a prime editor to a subject before administration with a PEgRNA and/or a ngRNA.

[0355] Suitable routes of administrating the prime editing compositions to a subject include, without limitation: topical, subcutaneous, transdermal, intradermal, intralesional, intraarticular, intraperitoneal, intravesical, transmucosal, gingival, intradental, intracochlear, transtympanic, intraorgan, epidural, intrathecal, intramuscular, intravenous, intravascular, intraosseus, periocular, intratumoral, intracerebral, and intracerebroventricular administration. In some embodiments, the compositions described are administered intraperitoneally, intravenously, or by direct injection or direct infusion. In some embodiments, the compositions described herein are administered by direct injection. In some embodiments, the compositions described herein are administered by subretinal injection. In some embodiments, the compositions described herein are administered by injection to the fovea or parafoveal regions. In some embodiments, the compositions described herein are administered by injection to peripheral regions of the retina. In some embodiments, the compositions described herein are administered by injection through the round window. In some embodiments, the compositions described herein are administered to the retina. In some embodiments, the compositions described herein are administered to a subject by injection, by means of a catheter, by means of a suppository, or by means of an implant.

[0356] In some embodiments, the method comprises administering cells edited with a prime editing composition described herein to a subject. In some embodiments, the cells are allogeneic. In some embodiments, allogeneic cells are or have been contacted ex vivo with a prime editing composition or pharmaceutical composition thereof and are introduced into a human subject in need thereof. In some embodiments, the cells are autologous to the subject. In some embodiments, cells are removed from a subject and contacted ex vivo with a prime editing composition or pharmaceutical composition thereof and are re-introduced into the subject.

[0357] In some embodiments, cells are contacted ex vivo with one or more components of a prime editing composition. In some embodiments, the ex vivo-contacted cells are introduced into the subject, and the subject is administered in vivo with one or more components of a prime editing composition. For example, in some embodiments, cells are contacted ex vivo with a prime editor and introduced into a subject. In some embodiments, the subject is then administered with a PEgRNA and/or a ngRNA, or a polynucleotide encoding the PEgRNA and/or the ngRNA.

[0358] In some embodiments, cells contacted with the prime editing composition are determined for incorporation of the one or more intended nucleotide edits in the genome before re-introduction into the subject. In some embodiments, the cells are enriched for incorporation of the one or more intended nucleotide edits in the genome before re-introduction into the subject. In some embodiments, the edited cells are primary cells. In some embodiments, the edited cells are progenitor cells. In some embodiments, the edited cells are stem cells. In some embodiments, the edited cells are hepatocytes. In some embodiments, the edited cells are primary human cells. In some embodiments, the edited cells are human progenitor cells. In some embodiments, the edited cells are human stem cells. In some embodiments, the edited cells are human hepatocytes. In some embodiments, the cell is a neuron. In some embodiments, the cell is a neuron from basal ganglia. In some embodiments, the cell is a neuron from basal ganglia of a subject. In some embodiments, the cell is a neuron in the basal ganglia of a subject. The prime editing composition or components thereof may be introduced into a cell by any delivery approaches as described herein, including LNP administration, RNP administration, electroporation, nucleofection, transfection, viral transduction, microinjection, cell membrane disruption and diffusion, or any other approach known in the art.

[0359] The cells edited with prime editing can be introduced into the subject by any route known in the art. In some embodiments, the edited cells are administered to a subject by direct infusion. In some embodiments, the edited cells are administered to a subject by intravenous infusion. In some embodiments, the edited cells are administered to a subject as implants.

[0360] The pharmaceutical compositions, prime editing compositions, and cells, as described herein, can be administered in effective amounts. In some embodiments, the effective amount depends upon the mode of administration. In some embodiments, the effective amount depends upon the stage of the condition, the age and physical condition of the subject, the nature of concurrent therapy, if any, and like factors well-known to the medical practitioner.

[0361] The specific dose administered can be a uniform dose for each subject. Alternatively, a subject's dose can be tailored to the approximate body weight of the subject. Other factors in determining the appropriate dosage can include the disease or condition to be treated or prevented, the severity of the disease, the route of administration, and the age, sex and medical condition of the patient.

[0362] In embodiments wherein components of a prime editing composition are administered sequentially, the time between sequential administration can be at least 1 hour, at least 2 hours, at least 6 hours, at least 12 hours, at least 24 hours, at least 36 hours, at least 48 hours, at least 3 days, at least 4 days, at least 5 days, at least 7 days, at least 10 days, or at least 14 days.

[0363] In some embodiments, a method of monitoring treatment progress is provided. In some embodiments, the method includes the step of determining a level of diagnostic marker, for example, correction of a mutation in SLC37A4 gene, or diagnostic measurement associated with Glycogen storage disease type 1B, in a subject suffering from Glycogen storage disease type 1B symptoms and has been administered an effective amount of a prime editing composition described herein. The level of the diagnostic marker determined in the method can be compared to known levels of the marker in either healthy normal controls or in other afflicted subjects to establish the subject's disease status.

### Delivery

[0364] Prime editing compositions described herein can be delivered to a cellular environment with any approach known in the art. Components of a prime editing composition can be delivered to a cell by the same mode or different modes. For example, in some embodiments, a prime editor can be delivered as a polypeptide or a polynucleotide (DNA or RNA) encoding the polypeptide. In some embodiments, a PEgRNA can be delivered directly as an RNA or as a DNA encoding the PEgRNA.

[0365] In some embodiments, a prime editing composition component is encoded by a polynucleotide, a vector, or a construct. In some embodiments, a prime editor polypeptide, a PEgRNA and/or a ngRNA is encoded by a polynucleotide. In some embodiments, the polynucleotide encodes a prime editor fusion protein comprising a DNA binding domain and a DNA polymerase domain. In some embodiments, the polynucleotide encodes a DNA polymerase domain of a prime editor. In some embodiments, the polynucleotide encodes a DNA polymerase domain of a prime editor. In some embodiments, the polynucleotide encodes a portion of a prime editor protein, for example, a N-terminal portion of a prime editor fusion protein connected to an intein-N. In some embodiments, the polynucleotide encodes a portion of a prime editor protein, for example, a C-terminal portion of a prime editor fusion protein connected to an intein-C. In some embodiments, the polynucleotide encodes a PEgRNA and/or a ngRNA. In some embodiments, the polypeptide encodes two or more components of a prime editing composition, for example, a prime editor fusion protein and a PEgRNA.

[0366] In some embodiments, the polynucleotide encoding one or more prime editing composition components is delivered to a target cell is integrated into the genome of the cell for long-term expression, for example, by a retroviral vector. In some embodiments, the polynucleotide delivered to a target cell is expressed transiently. For example, the polynucleotide may be delivered in the form of a mRNA, or a non-integrating vector (non-integrating virus, plasmids, minicircle DNAs) for episomal expression.

[0367] In some embodiments, a polynucleotide encoding one or more prime editing system components can be operably linked to a regulatory element, e.g., a transcriptional control element, such as a promoter. In some embodiments, the polynucleotide is operably linked to multiple control elements. Depending on the expression system utilized, any of a number of suitable transcription and translation control elements, including constitutive and inducible promoters, transcription enhancer elements, transcription terminators, etc. may be used in the expression vector (e.g., U6 promoter, H1 promoter).

[0368] In some embodiments, the polynucleotide encoding one or more prime editing composition components is a part of, or is encoded by, a vector. In some embodiments, the vector is a viral vector. In some embodiments, the vector is a non-viral vector.

[0369] Non-viral vector delivery systems can include DNA plasmids, RNA (e.g., a transcript of a vector described herein), naked nucleic acid, and nucleic acid complexed with a delivery vehicle, such as a liposome. In some embodiments, the polynucleotide is provided as an RNA, e.g., a mRNA or a transcript. Any RNA of the prime editing systems, for example a guide RNA or a base editor-encoding mRNA, can be delivered in the form of RNA. In some embodiments, one or more components of the prime editing system that are RNAs is produced by direct chemical synthesis or may be transcribed in vitro from a DNA. In some embodiments, a mRNA that encodes a prime editor polypeptide is generated using in vitro transcription. Guide polynucleotides (e.g., PEgRNA or ngRNA) can also be transcribed using in vitro transcription from a cassette containing a T7 promoter, followed by the sequence “GG”, and guide polynucleotide sequence. In some embodiments, the prime editor encoding mRNA, PEgRNA, and/or ngRNA are synthesized in vitro using an RNA polymerase enzyme (e.g., T7 polymerase, T3 polymerase, SP6 polymerase, etc.). Once synthesized, the RNA can directly contact a target SLC37A4 gene or can be introduced into a cell using any suitable technique for introducing nucleic acids into cells (e.g., microinjection, electroporation, transfection). In some embodiments, the prime editor-coding sequences, the PEgRNAs, and/or the ngRNAs are modified to include one or more modified nucleoside e.g., using pseudo-U or 5-Methyl-C.

[0370] Methods of non-viral delivery of nucleic acids can include lipofection, nucleofection, microinjection, biolistics, virosomes, liposomes, immunoliposomes, polycation or lipid: nucleic acid conjugates, naked DNA, artificial virions, cell membrane disruption by a microfluidics device, and agent-enhanced uptake of DNA. Cationic and neutral lipids that are suitable for efficient receptor-recognition lipofection of polynucleotides can be used. Delivery can be to cells (e.g., in vitro or ex vivo administration) or target tissues (e.g., in vivo administration). The preparation of lipid: nucleic acid complexes, including targeted liposomes such as immunolipid complexes, can be used.

[0371] Viral vector delivery systems can include DNA and RNA viruses, which can have either episomal or integrated genomes after delivery to the cell. RNA or DNA viral based systems can be used to target specific cells and trafficking the viral payload to an organelle of the cell. Viral vectors can be administered directly (in vivo) or they can be used to treat cells in vitro, and the modified cells can optionally be administered (ex vivo).

[0372] In some embodiments, the viral vector is a retroviral, lentiviral, adenoviral, adeno-associated viral or herpes simplex viral vector. Retroviral vectors can include those based upon murine leukemia virus (MuLV), gibbon ape leukemia virus (GaLV), simian immunodeficiency virus (SIV), human immunodeficiency virus (HIV), and combinations thereof. In some embodiments, the retroviral vector is a lentiviral vector. In some embodiments, the retroviral vector is a gamma retroviral vector. In some embodiments, the viral vector is an adenoviral vector. In some embodiments, the viral vector is an adeno-associated virus (“AAV”) vector.

[0373] In some embodiments, polynucleotides encoding one or more prime editing composition components are packaged in a virus particle. Packaging cells can be used to form virus particles that can infect a target cell. Such cells can include 293 cells, (e.g., for packaging adenovirus), and ψ 2 cells or PA317 cells (e.g., for packaging retrovirus). Viral vectors can be generated by producing a cell line that packages a nucleic acid vector into a viral particle. The vectors can contain the minimal viral sequences required for packaging and subsequent integration into a host. The vectors can contain other viral sequences being replaced by an expression cassette for the polynucleotide(s) to be expressed. The missing viral functions can be supplied in trans by the packaging cell line. For example, AAV vectors can comprise ITR sequences from the AAV genome which are required for packaging and integration into the host genome.

[0374] In some embodiments, dual AAV vectors are generated by splitting a large transgene expression cassette in two separate halves (5′ and 3′ ends that encode N-terminal portion and C-terminal portion of, e.g., a prime editor polypeptide), where each half of the cassette is no more than 5 kb in length, optionally no more than 4.7 kb in length, and is packaged in a single AAV vector. In some embodiments, the full-length transgene expression cassette is reassembled upon co-infection of the same cell by both dual AAV vectors. In some embodiments, a portion or fragment of a prime editor polypeptide, e.g., a Cas9 nickase, is fused to an intein. The portion or fragment of the polypeptide can be fused to the N-terminus or the C-terminus of the intein. In some embodiments, a N-terminal portion of the polypeptide is fused to an intein-N, and a C-terminal portion of the polypeptide is separately fused to an intein-C. In some embodiments, a portion or fragment of a prime editor fusion protein is fused to an intein and fused to an AAV capsid protein. The intein, nuclease and capsid protein can be fused together in any arrangement (e.g., nuclease-intein-capsid, intein-nuclease-capsid, capsid-intein-nuclease, etc.). In some embodiments, a polynucleotide encoding a prime editor fusion protein is split in two separate halves, each encoding a portion of the prime editor fusion protein and separately fused to an intein. In some embodiments, each of the two halves of the polynucleotide is packaged in an individual AAV vector of a dual AAV vector system. In some embodiments, each of the two halves of the polynucleotide is no more than 5 kb in length, optionally no more than 4.7 kb in length. In some embodiments, the full-length prime editor fusion protein is reassembled upon co-infection of the same cell by both dual AAV vectors, expression of both halves of the prime editor fusion protein, and self-excision of the inteins.

[0375] A target cell can be transiently or non-transiently transfected with one or more vectors described herein. A cell can be transfected as it naturally occurs in a subject. A cell can be taken or derived from a subject and transfected. A cell can be derived from cells taken from a subject, such as a cell line. In some embodiments, a cell transfected with one or more vectors described herein can be used to establish a new cell line comprising one or more vector-derived sequences. In some embodiments, a cell transiently transfected with the compositions of the disclosure (such as by transient transfection of one or more vectors, or transfection with RNA), and modified through the activity of a prime editor, can be used to establish a new cell line comprising cells containing the modification but lacking any other exogenous sequence. Any suitable vector compatible with the host cell can be used with the methods of the disclosure. Non-limiting examples of vectors include pXT1, pSG5, pSVK3, pBPV, pMSG, and pSVLSV40.

[0376] In some embodiments, a prime editor protein can be provided to cells as a polypeptide. In some embodiments, the prime editor protein is fused to a polypeptide domain that increases solubility of the protein. In some embodiments, the prime editor protein is formulated to improve solubility of the protein.

[0377] In some embodiment, a prime editor polypeptide is fused to a polypeptide permeant domain to promote uptake by the cell. In some embodiments, the permeant domain is a including peptide, a peptidomimetic, or a non-peptide carrier. For example, a permeant peptide may be derived from the third alpha helix of Drosophila melanogaster transcription factor Antennapaedia, referred to as penetratin, which comprises the amino acid sequence RQIKIWFQNRRMKWKK. As another example, the permeant peptide can comprise the HIV-1 tat basic region amino acid sequence, which may include, for example, amino acids 49-57 of naturally-occurring tat protein. Other permeant domains can include poly-arginine motifs, for example, the region of amino acids 34-56 of HIV-1 rev protein, nona-arginine, and octa-arginine. The nona-arginine (R9) sequence can be used. The site at which the fusion can be made may be selected in order to optimize the biological activity, secretion or binding characteristics of the polypeptide.

[0378] In some embodiments, a prime editor polypeptide is produced in vitro or by host cells, and it may be further processed by unfolding, e.g., heat denaturation, DTT reduction, etc. and may be further refolded. In some embodiments, a prime editor polypeptide is prepared by in vitro synthesis. Various commercial synthetic apparatuses can be used. By using synthesizers, naturally occurring amino acids can be substituted with unnatural amino acids. In some embodiments, a prime editor polypeptide is isolated and purified in accordance with recombinant synthesis methods, for example, by expression in a host cell and the lysate purified using HPLC, exclusion chromatography, gel electrophoresis, affinity chromatography, or other purification technique.

[0379] In some embodiments, a prime editing composition, for example, prime editor polypeptide components and PEgRNA/ngRNA are introduced to a target cell by nanoparticles. In some embodiments, the prime editor polypeptide components and the PEgRNA and/or ngRNA form a complex in the nanoparticle. Any suitable nanoparticle design can be used to deliver genome editing system components or nucleic acids encoding such components. In some embodiments, the nanoparticle is inorganic. In some embodiments, the nanoparticle is organic. In some embodiments, a prime editing composition is delivered to a target cell, e.g., a hepatocyte, in an organic nanoparticle, e.g., a lipid nanoparticle (LNP) or polymer nanoparticle.

[0380] In some embodiments, LNPs are formulated from cationic, anionic, neutral lipids, or combinations thereof. In some embodiments, neutral lipids, such as the fusogenic phospholipid DOPE or the membrane component cholesterol, are included to enhance transfection activity and nanoparticle stability. In some embodiments, LNPs are formulated with hydrophobic lipids, hydrophilic lipids, or combinations thereof. Lipids may be formulated in a wide range of molar ratios to produce an LNP. Any lipid or combination of lipids that are known in the art can be used to produce an LNP. Exemplary lipids used to produce LNPs are provided in Table 5 below.

[0381] In some embodiments, components of a prime editing composition form a complex prior to delivery to a target cell. For example, a prime editor fusion protein, a PEgRNA, and/or a ngRNA can form a complex prior to delivery to the target cell. In some embodiments, a prime editing polypeptide (e.g., a prime editor fusion protein) and a guide polynucleotide (e.g., a PEgRNA or ngRNA) form a ribonucleoprotein (RNP) for delivery to a target cell. In some embodiments, the RNP comprises a prime editor fusion protein in complex with a PEgRNA. RNPs may be delivered to cells using known methods, such as electroporation, nucleofection, or cationic lipid-mediated methods, or any other approaches known in the art. In some embodiments, delivery of a prime editing composition or complex to the target cell does not require the delivery of foreign DNA into the cell. In some embodiments, the RNP comprising the prime editing complex is degraded over time in the target cell. Exemplary lipids for use in nanoparticle formulations and/or gene transfer are shown in Table 3 below.

TABLE 5
Exemplary lipids for nanoparticle formulation or gene transfer

| | Abbre- | |
|---|---|---|
| Lipid | viation | Feature |
| 1,2-Dioleoyl-sn-glycero-3-phosphatidylcholine | DOPC | Helper |
| 1,2-Dioleoyl-sn-glycero-3- | DOPE | Helper |
| phosphatidylethanolamine | | |
| Cholesterol | | Helper |
| N41-(2,3-Dioleyloxy)prophyliN,N,N- | DOTMA | Cationic |
| trimethylammonium chloride | | |
| 1,2-Dioleoyloxy-3-trimethylammonium-propane | DOGS | Cationic |
| Dioctadecylamidoglycylspermine | | |
| N-(3-Aminopropy1)-N,N-dimethy1-2,3- | GAP- | Cationic |
| bis(dodecyloxy)-1-propanaminium bromide | DLRIE | |
| Cetyltrimethylammonium bromide | CTAB | Cationic |
| 6-Lauroxyhexyl omithinate | LHON | Cationic |
| 1-(2,3-Dioleoyloxypropy1)-2,4,6- | 2Oc | Cationic |
| trimethylpyridinium | | |
| 2,3-Dioleyloxy-N-P(spenninecarboxamido- | DOSPA | Cationic |
| ethy1J-N,Ndimethyl- | | |
| l-propanatninium trifluoroacetate | | |
| 1,2-Dioley1-3-trimethylamtnonium-propane | DOPA | Cationic |
| N-(2-Hydroxyethyl)-N,N-dimethy1-2,3- | MDRIE | Cationic |
| bis(tetradecyloxy)-1-propanaminium bromide | | |
| Dimyristooxypropyl dimethyl hydroxyethyl | DMRI | Cationic |
| ammonium bromide | | |
| 3β-[N-(N′,N′-Dimethylaminoethane)- | DC-Chol | Cationic |
| carbamoyl]cholesterol | | |
| Bis-guanidium-tren-cholesterol | BGTC | Cationic |
| 1,3-Diodeoxy-2-(6-carboxy-spermy1)- | DOSPER | Cationic |
| propylamide | | |
| Dimethyloctadecylammonium bromide | DDAB | Cationic |
| Dioctadecylamidoglicylspermidin | DSL | Cationic |
| rac-[(2,3-Dioctadecyloxypropyl)(2- | CLIP-1 | Cationic |
| hydroxyethyl)]-dimethylammonium chloride | | |
| rac-[2(2,3-Dihexadecyloxypropyloxymethyloxy) | CLIP-6 | Cationic |
| ethyl]trimethylammoniun bromide | | |
| Ethyldimyristoylphosphatidylcholine | EDMPC | Cationic |
| 1,2-Distearyloxy-N,N-dimethyl-3-aminopropane | DSDMA | Cationic |
| 1,2-Dimyristoyl-trimethylammonium propane | DMTAP | Cationic |
| O,O′-Dimyristyl-N-lysyl aspartate | DMKE | Cationic |
| 1,2-Distearoyl-sn-glycero-3-ethylpho sphocholine | DSEPC | Cationic |
| N-Palmitoyl D-erythro-sphingosyl carbamoyl- | CCS | Cationic |
| spenmine | | |
| N-t-Butyl-N0-tetradecyl-3- | diC14- | Cationic |
| tetradecylaminopropionamidine | amidine | |
| Octadecenolyoxy[ethyl-2-heptadecenyl-3 | DOTIM | Cationic |
| hydroxyethyl] imidazolinium chloride | | |
| N1-Cholesteryloxycarbonyl-3,7-diazanonane-1,9- | CDAN | Cationic |
| diamine | | |
| 2-(3-Bis(3-amino-propy1)-amino]propylamino)- | RPR209120 | Cationic |
| Nditetradecylcarbamoylme-ethyl-acetamide | | |
| 1,2-dilinoleyloxy-3-dimethylaminopropane | DLinDMA | Cationic |
| 2,2-dilinoley1-4-dimethylaminoethyl-[1,3]- | DLin-KC2- | Cationic |
| dioxolane | DMA | |
| dilinoleyl-methyl-4-dimethylaminobutyrate | DLin-MC3- | Cationic |
| | DMA | |

[0382] Exemplary polymers for use in nanoparticle formulations and/or gene transfer are shown in Table 6 below.

TABLE 6
Exemplary lipids for nanoparticle formulation or gene transfer

| Polymer | Abbreviation |
|---|---|
| Poly(ethylene)glycol | PEG |
| Polyethylenimine | PEI |
| Dithiobis (succinimidylpropionate) | DSP |
| Dimethyl-3,3′-dithiobispropionimidate | DTBP |
| Poly(ethylene imine)biscarbamate | PEIC |
| Poly(L-lysine) | PLL |
| Histidine modified PLL | |
| Poly(N-vinylpyrrolidone) | PVP |
| Poly(propylenimine) | PPI |
| Poly(amidoamine) | PAMAM |
| Poly(amidoethylenimine) | SS_PAEI |
| Triethylenetetramine | TETA |
| Poly(β-aminoester) | |
| Poly(4-hydroxy-L-proline ester) | PHP |
| Poly(allylamine) | |
| Poly(α-[4-aminobutyl]-L-glycolic acid) | PAGA |
| Poly(D,L-lactic-co-glycolic acid) | PLGA |
| Poly(N-ethyl-4-vinylpyridinium bromide) | |
| Poly(phosphazene)s | PPZ |
| Poly(phosphoester)s | PPE |
| Poly(phosphoramidate)s | PPA |
| Poly(N-2-hydroxypropylmethacrylamide) | pHPMA |
| Poly (2-(dimethylamino)ethyl methacrylate) | pDMAEMA |
| Poly(2-aminoethyl propylene phosphate) | PPE-EA |
| Chitosan | |
| Galactosylated chitosan | |
| N-dodacylated chitosam | |
| Histone | |
| Collagen | |
| Dextran-spermine | D-SPM |

[0383] Exemplary delivery methods for polynucleotides encoding prime editing composition components are shown in Table 7 below.

TABLE 7
Exemplary polynucleotide delivery methods

| | | Delivery | Duration | | |
|---|---|---|---|---|---|
| | | into Non- | of | Genome | Type of |
| Deliv- | | Dividing | Expres- | Inte- | Molecule |
| ery | Vector/Mode | Cells | sion | gration | Delivered |
| Physical | (e.g., | YES | Transient | NO | Nucleic |
| | electro- | | | | Acids and |
| | poration, | | | | Proteins |
| | particle gun, | | | | |
| | Calcium | | | | |
| | phosphate | | | | |
| | transfection) | | | | |
| Viral | Retrovirus | NO | Stable | YES | RNA |
| | Lentivirus | YES | Stable | YES/NO | RNA |
| | | | | with | |
| | | | | modifi- | |
| | | | | cation | |
| | Adenovirus | YES | Transient | NO | DNA |
| | Adeno- | YES | Stable | NO | DNA |
| | Associated | | | | |
| | Virus | | | | |
| | (AAV) | | | | |
| | Vaccinia | YES | Very | NO | DNA |
| | Virus | | Transient | | |
| | Herpes | YES | Stable | NO | DNA |
| | Simplex | | | | |
| | Virus | | | | |
| Non- | Cationic | YES | Transient | Depends | Nucleic |
| Viral | | | | on what is | acids and |
| | | | | delivered | Proteins |
| | Polymeric | YES | Transient | NO | Nucleic |
| | Nanoparticles | | | | Acids |
| Bio- | Attenuated | YES | Transient | NO | Nucleic |
| logical | Bacteria | | | | Acids |
| Non- | Engineered | YES | Transient | NO | Nucleic |
| Viral | Bacteriophages | | | | Acids |
| Deliv- | Mammalian | YES | Transient | NO | Nucleic |
| ery | Virus-like | | | | Acids |
| Vehi- | Particles | | | | |
| cles | Biological | YES | Transient | NO | Nucleic |
| | liposomes: | | | | Acids |
| | Erythrocyte | | | | |
| | Ghosts and | | | | |
| | Exosomes | | | | |

[0384] The prime editing compositions of the disclosure, whether introduced as polynucleotides or polypeptides, can be provided to the cells for about 30 minutes to about 24 hours, e.g., 1 hour, 1.5 hours, 2 hours, 2.5 hours, 3 hours, 3.5 hours 4 hours, 5 hours, 6 hours, 7 hours, 8 hours, 12 hours, 16 hours, 18 hours, 20 hours, or any other period from about 30 minutes to about 24 hours, which can be repeated with a frequency of about every day to about every 4 days, e.g., every 1.5 days, every 2 days, every 3 days, or any other frequency from about every day to about every four days. The compositions may be provided to the subject cells one or more times, e.g., one time, twice, three times, or more than three times, and the cells allowed to incubate with the agent(s) for some amount of time following each contacting event e.g., 16-24 hours. In cases in which two or more different prime editing system components, e.g., two different polynucleotide constructs are provided to the cell (e.g., different components of the same prime editing system, or two different guide nucleic acids that are complementary to different sequences within the same or different target genes), the compositions may be delivered simultaneously (e.g., as two polypeptides and/or nucleic acids). Alternatively, they may be provided sequentially, e.g., one composition being provided first, followed by a second composition.

[0385] The prime editing compositions and pharmaceutical compositions of the disclosure, whether introduced as polynucleotides or polypeptides, can be administered to subjects in need thereof for about 30 minutes to about 24 hours, e.g., 1 hour, 1.5 hours, 2 hours, 2.5 hours, 3 hours, 3.5 hours 4 hours, 5 hours, 6 hours, 7 hours, 8 hours, 12 hours, 16 hours, 18 hours, 20 hours, or any other period from about 30 minutes to about 24 hours, which can be repeated with a frequency of about every day to about every 4 days, e.g., every 1.5 days, every 2 days, every 3 days, or any other frequency from about every day to about every four days. The compositions may be provided to the subject one or more times, e.g., one time, twice, three times, or more than three times. In cases in which two or more different prime editing system components, e.g., two different polynucleotide constructs are administered to the subject (e.g., different components of the same prime editing system, or two different guide nucleic acids that are complementary to different sequences within the same or different target genes), the compositions may be administered simultaneously (e.g., as two polypeptides and/or nucleic acids). Alternatively, they may be provided sequentially, e.g., one composition being provided first, followed by a second composition.

### EXAMPLES

### Example 1—Screening of PEgRNA for Editing of a Mutation Associated with Glycogen Storage Disease Type 1B

[0386] The following examples are provided for illustrative purposes only and are not intended to limit the scope of the claims provided herein.

[0387] PEgRNA assembly: PEgRNA libraries were assembled by one of three methods: in the first method, pooled synthesized DNA oligos encoding the PEgRNA and flanking U6 expression plasmid homology regions were cloned into U6 expression plasmids via Gibson cloning and sequencing of bacterial colonies via Sanger or Next-generation sequencing. In the second method, double-stranded linear DNA fragments encoding PEgRNA and homology sequences as above were individually Gibson-cloned into U6 expression plasmids. In the third method, for each PEgRNA, separate oligos encoding a protospacer, a gRNA scaffold, and PEgRNA extension (PBS and RTT) were ligated, and then cloned into a U6 expression plasmid as described in Anzalone et al., Nature. 2019 December; 576 (7785): 149-157. Bacterial colonies carrying sequence-verified plasmids were propagated in LB or TB. Plasmid DNA is purified by minipreps for mammalian transfection.

[0388] Chemically synthesized PEgRNAs were modified at the 5′ end and the 3′ end: the three 5′ most nucleotides were modified to phosphorothioated 2′-O-methyl nucleotides. The three consecutive nucleotides that precede the 3′ most nucleotide (i.e. three consecutive nucleotides immediately 5′ of the last nucleotide at the 3′ end) were also modified to phosphorothioated 2′-O-methyl nucleotides.

[0389] HEK cell culture and transfection: HEK293T cells were propagated in DMEM with 10% FBS. Prior to transfection, cells were seeded in 96-well plates and then transfected with Lipofectamine 2000 or MessengerMax according to the manufacturer's directions with DNA or mRNA encoding PE2 and PEgRNA (and ngRNA for PE3 experiments). Three days after transfection, gDNA was harvested in lysis buffer for high throughput sequencing and was sequenced using Miseq.

[0390] Lentiviral production and cell line generation: Generation of mutant cell line. Lentiviral transfer plasmids containing the SLC37A4 c.1015G->T mutation (G339C) with flanking sequences from the SLC37A4 gene on each side, and an IRES-Puromycin selection cassette, may be cloned behind an EF1α short promoter. HEK293T cells may be transiently transfected with the transfer plasmids and packaging plasmids containing VSV glycoprotein and lentiviral gag/pol coding sequences. After transfection, lentiviral particles may be harvested from the cell media and concentrated. HEK293T cells may be transduced using serial dilutions of the lentiviral particles described above. Cells generated at a dilution of MOI <1, as determined by survival following puromycin, are selected for expansion. A resulting HEK293T cell line carrying the c. 1015G->T mutation may be used to screen PEgRNAs.

### Installation of G339C Mutation by Prime Editing: Alternate Method for Generation of Mutant Cell Line.

[0391] PEgRNAs for NGG PAM recognition were designed to incorporate a SLC37A4 c. 1015G->T mutation in the wild type endogenous SLC37A4 gene in HEK293T cells by prime editing as a proxy to examine editing efficiency.

[0392] A wild type HEK293T cell line was expanded and transiently transfected with a plasmid encoding the PE2 fusion protein and a G339C mutation installation PEgRNA in arrayed 96-well plates for assessment of editing by high-throughput sequencing. Prior to transfection, cells were seeded in 96-well plates and then transfected with Lipofectamine 2000 or MessengerMax according to the manufacturer's directions with DNA or mRNA PE2 and PEgRNA. Three days after transfection, gDNA was harvested in lysis buffer for high throughput sequencing and sequenced using Miseq.

[0393] Glycogen storage disease type 1B mutation correction with PE2 system: A HEK293T cell line carrying the G339C mutation, such as one made by a method described above, was expanded and transiently transfected with a PE and PEgRNA in arrayed 96-well plates for assessment of editing by high-throughput sequencing. An exemplary PEgRNA spacer close to the G339C mutation is listed in Table 8. Spacer S01 has a sequence from the sense (or positive) strand.

[0394] Exemplary RTT sequences in PEgRNAs for spacers S01, S02, S03, S04, S05, S06, S07, S08, S09, and S10 are listed in Tables 9a, 10a, 11a, 12a, 13a, 14a, 15a, 16a, 17a, and 18a, respectively. Exemplary PBS sequences in PEgRNAs for spacers S01, S02, S03, S04, S05, S06, S07, S08, S09, and S10 are listed in Tables 9b, 10b, 11b, 12b, 13b, 14b, 15b, 16b, 17b, and 18b, respectively. Exemplary RTT/PBS combinations in PEgRNAs for spacers S01, S02, S03, S04, S05, S06, S07, S08, S09, and S10 are listed in Tables 9c, 10c, 11c, 12c, 13c, 14c, 15c, 16c, 17c, and 18c, respectively.

[0395] The PEgRNAs made according to these exemplary embodiments may contain, in order from 5′ to 3′, a spacer, a gRNA core (SEQ ID NO: 54) as discussed above, an RTT appropriate for the spacer, a PBS appropriate for the spacer, and a 3′ end modifier region (SEQ ID NO: 57) as discussed above. In some embodiments, a PEgRNA includes the sequence of spacer S01, an RTT sequence selected from the RTT sequences listed in Table 9a, and a PBS sequence selected from the PBS sequences listed in Table 9b (an “S01 PEgRNA”). In some embodiments, a PEgRNA includes the sequence of spacer S02, an RTT sequence selected from the RTT sequences listed in Table 10a, and a PBS sequence selected from the PBS sequences listed in Table 10b (an “S02 PEgRNA”). In some embodiments, a PEgRNA includes the sequence of spacer S03, an RTT sequence selected from the RTT sequences listed in Table 11a, and a PBS sequence selected from the PBS sequences listed in Table 11b (an “S03 PEgRNA”). In some embodiments, a PEgRNA includes the sequence of spacer S04, an RTT sequence selected from the RTT sequences listed in Table 12a, and a PBS sequence selected from the PBS sequences listed in Table 12b (an “S04 PEgRNA”). In some embodiments, a PEgRNA includes the sequence of spacer S05, an RTT sequence selected from the RTT sequences listed in Table 13a, and a PBS sequence selected from the PBS sequences listed in Table 13b (an “S05 PEgRNA”). In some embodiments, a PEgRNA includes the sequence of spacer S06, an RTT sequence selected from the RTT sequences listed in Table 14a, and a PBS sequence selected from the PBS sequences listed in Table 14b (an “S06 PEgRNA”). In some embodiments, a PEgRNA includes the sequence of spacer S07, an RTT sequence selected from the RTT sequences listed in Table 15a, and a PBS sequence selected from the PBS sequences listed in Table 15b (an “S07 PEgRNA”). In some embodiments, a PEgRNA includes the sequence of spacer S09, an RTT sequence selected from the RTT sequences listed in Table 16a, and a PBS sequence selected from the PBS sequences listed in Table 16b (an “S08 PEgRNA”). In some embodiments, a PEgRNA includes the sequence of spacer S09, an RTT sequence selected from the RTT sequences listed in Table 17a, and a PBS sequence selected from the PBS sequences listed in Table 17b (an “S09 PEgRNA”). In some embodiments, a PEgRNA includes the sequence of spacer S10, an RTT sequence selected from the RTT sequences listed in Table 18a, and a PBS sequence selected from the PBS sequences listed in Table 18b (an “S10 PEgRNA”).

[0396] The PEgRNA may also include a 5′ end modifier region as discussed above. The PEgRNAs made according to these exemplary embodiments may include chemically modified RNA nucleobases as discussed above. Specifically, in these PEgRNAs the first three 5′ residues may be phosphorothioated 2′O-methyl RNA bases, and the last three 3′ residues before the final residue (i.e., the three consecutive nucleotides immediately 5′ of the last nucleotide at the 3′ end) may be phosphorothioated 2′O-methyl RNA bases.

[0397] The results of several experiments measuring correction of the G339C mutation in HEK293T cells using various synthetic PEgRNAs alone are reported in Table 18d, Table 18e, Table 18f, and Table 18g. PEgRNAs are identified by “PEG-nnnn” numbers, for each of which RTT and PSB sequences are provided elsewhere. The data is reported as percentage of sampled cells in which sequencing identified the mutation as correctly repaired (“edit %”) or otherwise (i.e., incorrectly) modified (“indel %”).

[0398] The results of several experiments measuring correction of the L348fs mutation in HEK293T cells using various synthetic PEgRNAs alone are reported in Table 24d and Table 24e. PEgRNAs are identified by “PEG-nnnn” numbers, for each of which RTT and PSB sequences are provided elsewhere. The data is reported as percentage of sampled cells in which sequencing identified the mutation as correctly repaired (“edit %”) or otherwise (i.e., incorrectly) modified (“indel %”).

[0399] Glycogen storage disease type 1B G339C mutation correction with PE3 system: a second-nick guide RNA (“ngRNA”) that causes a nick on the opposite strand compared to the PEgRNA (i.e., on the non-edit strand) may be included in order improve efficiency and/or fidelity of prime editing as discussed above. Exemplary ngRNA negative-strand spacers are listed in Table 8a, and exemplary positive-strand spacers are listed in Table 8b. A ngRNA according to these exemplary embodiments will contain, in order from 5′ to 3′, a spacer, a gRNA core such as SEQ ID NO: 54 as discussed above, and optionally a 3′ end modifier region such as SEQ ID NO: 57 as discussed above. The ngRNA may also include a 5′ end modifier region as discussed above. The ngRNA may include chemically modified RNA nucleobases as discussed above. For example, in a ngRNA the first three 5′ residues may be phosphorothioated 2′O-methyl RNA bases, and the last three 3′ residues may be phosphorothioated 2′O-methyl RNA bases. A PEgRNA with a positive-strand spacer may be paired with negative-strand ngRNA. In some embodiments, a PE3 system may include an S01 PEgRNA and an ngRNA with a spacer having a sequence from Table 8A. In some embodiments, a PE3 system may include an S02 PEgRNA and an ngRNA with a spacer having a sequence from Table 8A. In some embodiments, a PE3 system may include an S03 PEgRNA and an ngRNA with a spacer having a sequence from Table 8A. In some embodiments, a PE3 system may include an S04 PEgRNA and an ngRNA with a spacer having a sequence from Table 8A. In some embodiments, a PE3 system may include an S05 PEgRNA and an ngRNA with a spacer having a sequence from Table 8A. In some embodiments, a PE3 system may include a PEgRNA comprising the spacer S06 and an ngRNA with a spacer having a sequence from Table 8A. In some embodiments, a PE3 system may include a PEgRNA comprising the spacer S07 and an ngRNA with a spacer having a sequence from Table 8B. In some embodiments, a PE3 system may include a PEgRNA comprising the spacer S08 and an ngRNA with a spacer having a sequence from Table 8B. In some embodiments, a PE3 system may include a PEgRNA comprising the spacer S09 and an ngRNA with a spacer having a sequence from Table 8B. In some embodiments, a PE3 system may include a PEgRNA comprising the spacer S10 and an ngRNA with a spacer having a sequence from Table 8B.

[0400] The results of several experiments measuring correction of the G339C mutation in HEK293T cells using various synthetic PEgRNAs in combination with various ngRNAs as laid out in the tables referenced above are reported in Table 18h, Table 18i, and Table 18j. PEgRNAs are identified by “PEG-nnnn” numbers, for each of which RTT and PSB sequences are provided elsewhere. ngRNAs are identified by sequence numbers from Table 8c and Table 8d. The data is reported as percentage of sampled cells in which sequencing identified the mutation as correctly repaired (“edit %”) or otherwise (i.e., incorrectly) modified (“indel %”).

Glycogen Storage Disease Type 1B Mutation Correction with PE3 System in iPSC:

[0401] A dose-response study was conducted using in human inducible pluripotent stem cells. iPSCs were mutated to carry the G339C mutation in the SLC37A4 gene and differentiated to a hepatocyte lineage. They were co-transfected mRNA encoding Prime Editor, RNA encoding PEgRNA and RNA encoding ngRNA targeting the SLC37A4 gene. Seventy-two hours following transfection gDNA were harvested. Next generation sequencing was used to calculate editing efficiency by quantifying the number of alleles with the desired sequence change. iPSC transfection: iPSCs were seeded in a 96-well plate the day prior to transfection. On transfection day, a mixture consisting of mRNA encoding Prime Editor, RNA encoding PEgRNA, and ngRNA were diluted in Optimem for a total volume of 6.5 μl. This mix was titrated together, keeping the ratio of mRNA, PEgRNA and ngRNA fixed. PEgRNA doses tested were 112, 74.7, 49.8, 33.2, 22.1, 14.7, 9.8, 6.6, 4.4, 2.9, 2.0 and 1.3 ng. ngRNA doses tested were 37.3, 24.9, 16.6, 11.1, 7.4, 4.9, 3.3, 2.2, 1.5, 1, 0.7 and 0.4 ng. Prime Editor mRNA doses tested were 337.4, 224.9, 150, 100, 66.6, 44.4, 29.6, 19.7, 13.1, 8.8, 5.8 and 3.9 ng. The mixture was then added to a dilution of transfection reagent consisting of Lipofectamine Stem reagent diluted in Optimem for a total volume of 6.5 ul. The two mixtures were mixed and incubated for 10 min at room temperature. 13 ul of transfection mixture were added to each well and swirled to ensure even distribution. Plates were returned to the incubator and cultured at 37 C with 5% CO₂.

[0402] Two trials of dose responses for various combinations of PEgRNA and ngRNA were tested in iPSC, with two replicates for each trial. The results are provided in Table 18k. The reported dose is the sum of mRNAm PEgRNA, and ngRNA.

[0403] As noted above, PEgRNAs comprising the spacers S07, S08, S09, or S10, when they also include an RTT sequence from Tables 15a, 16a, 17a, or 18a, respectively, can also correct the nearby c. 1042-1043delCT (L348fs) frameshift mutation. This is because the editing template is long enough to provide a corrective sequence template to cover both mutation sites.

[0404] Lentiviral production and cell line generation: Generation of mutant cell line. Lentiviral transfer plasmids containing the SLC37A4 c. 1042delCT mutation (L348fs) with flanking sequences from the SLC37A4 gene on each side, and an IRES-Puromycin selection cassette, may be cloned behind an EF1α short promoter. HEK293T cells may be transiently transfected with the transfer plasmids and packaging plasmids containing VSV glycoprotein and lentiviral gag/pol coding sequences. After transfection, lentiviral particles may be harvested from the cell media and concentrated. HEK293T cells may be transduced using serial dilutions of the lentiviral particles described above. Cells generated at a dilution of MOI <1, as determined by survival following puromycin, are selected for expansion. A resulting HEK293T cell line carrying the c. 1042delCT mutation may be used to screen PEgRNAs.

### Installation of L348fs Mutation by Prime Editing: Alternate Method for Generation of Mutant Cell Line.

[0405] PEgRNAs for NGG PAM recognition were designed to incorporate a SLC37A4 c. 1042delCT mutation in the wild type endogenous SLC37A4 gene in HEK293T cells by prime editing as a proxy to examine editing efficiency.

[0406] A wild type HEK293T cell line is expanded and transiently transfected with a plasmid encoding the PE2 fusion protein and a L348fs mutation installation PEgRNA in arrayed 96-well plates for assessment of editing by high-throughput sequencing. Prior to transfection, cells were seeded in 96-well plates and then transfected with Lipofectamine 2000 or MessengerMax according to the manufacturer's directions with DNA or mRNA PE2 and PEgRNA. Three days after transfection, gDNA was harvested in lysis buffer for high throughput sequencing and sequenced using Miseq.

[0407] Glycogen storage disease type 1B mutation correction with PE2 system: A HEK293T cell line carrying the L348fs mutation, such as one made by a method described above, is expanded and transiently transfected with a PE and PEgRNA in arrayed 96-well plates for assessment of editing by high-throughput sequencing. Six exemplary PEgRNA spacers close to the L348fs mutation are listed in Table 8. Spacers S11, S12, and S13 have sequences from the sense (or positive) strand, and spacers S14, S15, and S16 have sequences from the antisense (or negative) strand.

[0408] Exemplary RTT sequences in PEgRNAs for spacers S11, S12, S13, S14, S15, and S16 are listed in Tables 19a, 20a, 21a, 22a, 23a, and 24a, respectively. Exemplary PBS sequences in PEgRNAs for spacers $11, S12, S13, S14, S15, and S16 are listed in Tables 19b, 20b, 21b, 22b, 23b, and 24b, respectively. Exemplary RTT/PBS combinations in PEgRNAs for spacers S11, S12, S13, S14, S15, and S16 are listed in Tables 19c, 20c, 21c, 22c, 23c, and 24c, respectively.

[0409] The PEgRNAs made according to these exemplary embodiments may contain, in order from 5′ to 3′, a spacer, a gRNA core (e.g., SEQ ID NO: 54) as discussed above, an RTT appropriate for the spacer, a PBS appropriate for the spacer, and a 3′ end modifier region (e.g., SEQ ID NO: 57) as discussed above. In some embodiments, a PEgRNA includes the sequence of spacer S11, an RTT sequence selected from the RTT sequences listed in Table 19a, and the sequence of one PBS in Table 19b (an “S11 PEgRNA”). In some embodiments, a PEgRNA includes the sequence of spacer S12, an RTT sequence selected from the RTT sequences listed in Table 20a, and a PBS sequence selected from the PBS sequences listed in Table 20b (an “S12 PEgRNA”). In some embodiments, a PEgRNA includes the sequence of spacer S13, an RTT sequence selected from the RTT sequences listed in Table 21a, and a PBS sequence selected from the PBS sequences listed in PBS in Table 21b (an “S13 PEgRNA”). In some embodiments, a PEgRNA includes the sequence of spacer S14, an RTT sequence selected from the RTT sequences listed in Table 22a, and a PBS sequence selected from the PBS sequences listed in Table 22b (an “S14 PEgRNA”). In some embodiments, a PEgRNA includes the sequence of spacer S15, an RTT sequence selected from the RTT sequences listed in Table 23a, and a PBS sequence selected from the PBS sequences listed in Table 23b (an “S15 PEgRNA”). In some embodiments, a PEgRNA includes the sequence of spacer S16, an RTT sequence selected from the RTT sequences listed in Table 24a, and a PBS sequence selected from the PBS sequences listed in in Table 24b (an “S16 PEgRNA”).

[0410] The PEgRNA may also include a 5′ end modifier region as discussed above. The PEgRNAs made according to these exemplary embodiments may include chemically modified RNA nucleobases as discussed above. Specifically, in these PEgRNAs the first three 5′ residues may be phosphorothioated 2′O-methyl RNA bases, and the last three 3′ residues before the final residue (i.e., the three consecutive nucleotides immediately 5′ of the last nucleotide at the 3′ end) may be phosphorothioated 2′O-methyl RNA bases.

[0411] Glycogen storage disease type 1B mutation correction with PE3 system: a second-nick guide RNA (“ngRNA”) that causes a nick on the opposite strand compared to the PEgRNA (i.e., on the non-edit strand) may be included in order improve efficiency and/or fidelity of prime editing as discussed above. Exemplary ngRNA negative-strand spacers are listed in Table 8c, and exemplary positive-strand spacers are listed in Table 8d. ngRNAs according to these exemplary embodiments may contain, in order from 5′ to 3′, a spacer, a gRNA core such as SEQ ID NO: 54 as discussed above, and optionally a 3′ end modifier region such as SEQ ID NO: 57 as discussed above. The ngRNA may also include a 5′ end modifier region as discussed above. The ngRNA may include chemically modified RNA nucleobases as discussed above. For example, in a ngRNA the first three 5′ residues may be phosphorothioated 2′O-methyl RNA bases, and the last three 3′ residues may be phosphorothioated 2′O-methyl RNA bases. A PEgRNA with a positive-strand spacer may be paired with negative-strand ngRNA. In some embodiments, a PE3 system may include a PEgRNA comprising the spacer S11 and an ngRNA with a spacer having a sequence selected from the ngRNA spacer sequences provided in Table 8c. In some embodiments, a PE3 system may include a PEgRNA comprising the spacer S12 and an ngRNA with a spacer having a sequence selected from the ngRNA spacer sequences provided in Table 8c. In some embodiments, a PE3 system may include a PEgRNA comprising the spacer S13 and an ngRNA with a spacer having a sequence selected from the ngRNA spacer sequences provided in Table 8c. In some embodiments, a PE3 system may include a PEgRNA comprising the spacer S14 and an ngRNA with a spacer having a sequence selected from the ngRNA spacer sequences provided in Table 8d. In some embodiments, a PE3 system may include a PEgRNA comprising the spacer S15 and an ngRNA with a spacer having a sequence selected from the ngRNA spacer sequences provided in Table 8d. In some embodiments, a PE3 system may include a PEgRNA comprising the spacer S16 and an ngRNA with a spacer having a sequence selected from the ngRNA spacer sequences provided in Table 8d.

[0412] The results of several experiments measuring correction of the L348fs mutation in HEK293T cells using various synthetic PEgRNAs in combination with various ngRNAs as laid out in the tables referenced above are reported in Table 24f, Table 24g, Table 24h, and Table 24i. PEgRNAs are identified by “PEG-nnnn” numbers, for each of which RTT and PSB sequences are provided elsewhere. ngRNAs are identified by sequence numbers from Table 8c and Table 8d. The data is reported as percentage of sampled cells in which sequencing identified the mutation as correctly repaired (“edit %”) or otherwise (i.e., incorrectly) modified (“indel %”).

Glycogen Storage Disease Type 1B L348fs Mutation Correction with PE3 System in iPSC:

[0413] A dose-response study was conducted using in human inducible pluripotent stem cells. iPSCs were mutated to carry the L348fs mutation in the SLC37A4 gene and differentiated to a hepatocyte lineage. They were co-transfected mRNA encoding Prime Editor, RNA encoding PEgRNA and RNA encoding ngRNA targeting the SLC37A4 gene. Seventy-two hours following transfection gDNA were harvested. Next generation sequencing was used to calculate editing efficiency by quantifying the number of alleles with the desired sequence change. iPSC transfection: iPSCs were seeded in a 96-well plate the day prior to transfection. On transfection day, a mixture consisting of mRNA encoding Prime Editor, RNA encoding PEgRNA, and ngRNA were diluted in Optimem for a total volume of 6.5 μl. This mix was titrated together, keeping the ratio of mRNA, PEgRNA and ngRNA fixed. PEgRNA doses tested were 112, 74.7, 49.8, 33.2, 22.1, 14.7, 9.8, 6.6, 4.4, 2.9, 2.0 and 1.3 ng. ngRNA doses tested were 37.3, 24.9, 16.6, 11.1, 7.4, 4.9, 3.3, 2.2, 1.5, 1, 0.7 and 0.4 ng. Prime Editor mRNA doses tested were 337.4, 224.9, 150, 100, 66.6, 44.4, 29.6, 19.7, 13.1, 8.8, 5.8 and 3.9 ng. The mixture was then added to a dilution of transfection reagent consisting of Lipofectamine Stem reagent diluted in Optimem for a total volume of 6.5 ul. The two mixtures were mixed and incubated for 10 min at room temperature. 13 ul of transfection mixture were added to each well and swirled to ensure even distribution. Plates were returned to the incubator and cultured at 37 C with 5% CO₂.

[0414] Two trials of dose responses for various combinations of PEgRNA and ngRNA were tested in iPSC, with two replicates for each trial. The results are provided in Table 24j. The reported dose is the sum of mRNAm PEgRNA, and ngRNA.

[0415] As noted above, PEgRNAs comprising the S12 or S13 spacers, when they also include an RTT sequence from Tables 20a or 21a, respectively, can also correct the nearby c.1015G->T (G339C) transversion mutation. This is because the editing template is long enough to provide a corrective sequence template to cover both mutation sites.

### Sequences and Sequence Tables

Exemplary wild type moloney murine leukemia virus reverse transcriptase (SEQ ID NO: 50):
TLNIEDEYRLHETSKEPDVSLGSTWLSDFPQAWAETGGMGLAVRQAPLIIPLKATSTP
VSIKQYPMSQEARLGIKPHIQRLLDQGILVPCQSPWNTPLLPVKKPGTNDYRPVQDLR
EVNKRVEDIHPTVPNPYNLLSGLPPSHQWYTVLDLKDAFFCLRLHPTSQPLFAFEWR
DPEMGISGQLTWTRLPQGFKNSPTLFDEALHRDLADFRIQHPDLILLQYVDDLLLAAT
SELDCQQGTRALLQTLGNLGYRASAKKAQICQKQVKYLGYLLKEGQRWLTEARKE
TVMGQPTPKTPRQLREFLGTAGFCRLWIPGFAEMAAPLYPLTKTGTLFNWGPDQQK
AYQEIKQALLTAPALGLPDLTKPFELFVDEKQGYAKGVLTQKLGPWRRPVAYLSKK
LDPVAAGWPPCLRMVAAIAVLTKDAGKLTMGQPLVILAPHAVEALVKQPPDRWLS
NARMTHYQALLLDTDRVQFGPVVALNPATLLPLPEEGLQHNCLDILAEAHGTRPDL
TDQPLPDADHTWYTDGSSLLQEGQRKAGAAVTTETEVIWAKALPAGTSAQRAELIA
LTQALKMAEGKKLNVYTDSRYAFATAHIHGEIYRRRGLLTSEGKEIKNKDEILALLK
ALFLPKRLSIIHCPGHQKGHSAEARGNRMADQAARKAAITETPDTSTLLIENSSP
Exemplary Streptococcus pyogenes Cas9 (SpCas9) amino acid sequence (SEQ ID NO: 51):
[sequence omitted]
Exemplary Staphylococcus lugdunensis Cas9 (Slu Cas9) amino acid sequence
WP_002460848.1 (SEQ ID NO: 52):
MKRNYILGLDIGITSVGYGIIDYETRDVIDAGVRLFKEANVENNEGRRSKRGARRLK
RRRRHRIQRVKKLLFDYNLLTDHSELSGINPYEARVKGLSQKLSEEEFSAALLHLAKR
RGVHNVNEVEEDTGNELSTKEQISRNSKALEEKYVAELQLERLKKDGEVRGSINRFK
TSDYVKEAKQLLKVQKAYHQLDQSFIDTYIDLLETRRTYYEGPGEGSPFGWKDIKE
WYEMLMGHCTYFPEELRSVKYAYNADLYNALNDLNNLVITRDENEKLEYYEKFQII
ENVFKQKKKPTLKQIAKEILVNEEDIKGYRVTSTGKPEFTNLKVYHDIKDITARKEIIE
NAELLDQIAKILTIYQSSEDIQEELTNLNSELTQEEIEQISNLKGYTGTHNLSLKAINLIL
DELWHTNDNQIAIFNRLKLVPKKVDLSQQKEIPTTLVDDFILSPVVKRSFIQSIKVINAI
IKKYGLPNDIIIELAREKNSKDAQKMINEMQKRNRQTNERIEEIIRTTGKENAKYLIEKI
KLHDMQEGKCLYSLEAIPLEDLLNNPFNYEVDHIIPRSVSFDNSFNNKVLVKQEEASK
KGNRTPFQYLSSSDSKISYETFKKHILNLAKGKGRISKTKKEYLLEERDINRFSVQKDF
INRNLVDTRYATRGLMNLLRSYFRVNNLDVKVKSINGGFTSFLRRKWKFKKERNKG
YKHHAEDALIIANADFIFKEWKKLDKAKKVMENQMFEEKQAESMPEIETEQEYKEIF
ITPHQIKHIKDFKDYKYSHRVDKKPNRELINDTLYSTRKDDKGNTLIVNNLNGLYDK
DNDKLKKLINKSPEKLLMYHHDPQTYQKLKLIMEQYGDEKNPLYKYYEETGNYLTK
YSKKDNGPVIKKIKYYGNKLNAHLDITDDYPNSRNKVVKLSLKPYRFDVYLDNGVY
KFVTVKNLDVIKKENYYEVNSKCYEEAKKLKKISNQAEFIASFYNNDLIKINGELYR
VIGVNNDLLNRIEVNMIDITYREYLENMNDKRPPRIIKTIASKTQSIKKYSTDILGNLY
EVKSKKHPQIIKK
Exemplary prime editor fusion protein: SEQ ID NO: 53 (see Table 4).
SLC37A4/G6PT1 amino acid sequence (SEQ ID NO: 1):
MAAQGYGYYRTVIFSAMFGGYSLYYFNRKTFSFVMPSLVEEIPLDKDDLGFITSSQS
AAYAISKFVSGVLSDQMSARWLFSSGLLLVGLVNIFFAWSSTVPVFAALWFLNGLAQ
GLGWPPCGKVLRKWFEPSQFGTWWAILSTSMNLAGGLGPILATILAQSYSWRSTLAL
SGALCVVVSFLCLLLIHNEPADVGLRNLDPMPSEGKKGSLKEESTLQELLLSPYLWV
LSTGYLVVFGVKTCCTDWGQFFLIQEKGQSALVGSSYMSALEVGGLVGSIAAGYLS
DRAMAKAGLSNYGNPRHGLLLFMMAGMTVSMYLFRVTVTSDSPKLWILVLGAVFG
FSSYGPIALFGVIANESAPPNLCGTSHAIVGLMANVGGFLAGLPFSTIAKHYSWSTAF
WVAEVICAASTAAFFLLRNIRTKMGRVSKKAE
SLC37A4/G6PT1 cDNA sequence (SEQ ID NO: 2):
gtcctattcgggctcccgcctctgttcagttccagagacaattcatgggtcttggggccaccgaggcgctgtccctgaccaccagcacg
agacccctttctatcgcgccagtcctgtggtctccgcacctctccagctcctgcacccccggcccccgtggttcccagccgcacagtag
cgtgtcctgggtagcgtgaggacccacggggctgggcaggtgccacgagcccgccgcctcttcgccgcccgccgcctctcctcctc
tcccgcccgccgcctggccctcccctaccaggctgagcctctgggtgccagaagcgcggggcctccgggagaatacgtgcggtcg
cccgctccgcgtgcgcctacgccttctgctccagttgctttcccaattgagcggaaaagccggggcatgttgccggggccctgggcg
ggacggttgtgccctgcagcccgaagcccgccggggcaccttcccgcccacgagctgcccagtccctctgcttgcggcccctgcca
acgtcccacaggacactgggtccccttggagcctccccaggcttaatgattgtccagaaggcggctataaagggagcctgggaggct
gggggaggagggagcagaaaaaacccaactcagcagatctgggaactgtgagagcggcaagcaggaactgtggtcagaggctg
tgcgtcttggctggtagggcctgctcttttctaccATGgcagcccagggctatggctattatcgcactgtgatcttctcagccatgtttg
ggggctacagcctgtattacttcaatcgcaagaccttctcctttgtcatgccatcattggtggaagagatccctttggacaaggatgatttg
gggttcatcaccagcagccagtcggcagcttatgctatcagcaagtttgtcagtggggtgctgtctgaccagatgagtgctcgctggct
cttctcttctgggctgctcctggttggcctggtcaacatattctttgcctggagctccacagtacctgtctttgctgccctctggttcctta
atggcctggcccaggggctgggctggcccccatgtgggaaggtcctgcggaagtggtttgagccatctcagtttggcacttggtgggcca
tcctgtcaaccagcatgaacctggctggagggctgggccctatcctggcaaccatccttgcccagagctacagctggcgcagcacgc
tggccctatctggggcactgtgtgtggttgtctccttcctctgtctcctgctcatccacaatgaacctgctgatgttggactccgcaacctg
gaccccatgccctctgagggcaagaagggctccttgaaggaggagagcaccctgcaggagctgctgctgtccccttacctgtgggtg
ctctccactggttaccttgtggtgtttggagtaaagacctgctgtactgactggggccagttcttccttatccaggagaaaggacagtcag
cccttgtaggtagctcctacatgagtgccctggaagttgggggccttgtaggcagcatcgcagctggctacctgtcagaccgggccat
ggcaaaggcgggactgtccaactacgggaaccctcgccatggcctgttgctgttcatgatggctggcatgacagtgtccatgtacctct
tccgggtaacagtgaccagtgactcccccaagctctggatcctggtattgggagctgtattt [symbol] gtttctcctcgtatggccccattgccct
gtttggagtcatagccaacgagagtgcccctcccaacttgtgtggcacctcccacgccattgtgggactcatggccaatgtgggcggc
tttctggctgggctgcccttcagcaccattgccaagcactacagttggagcacagccttctgggtggctgaagtgatttgtgcggccag
cacggctgccttcttcctcctacgaaacatccgcaccaagatgggccgagtgtccaagaaggctgagtgaagagagtccaggttccg
gagcaccatcccacggtggccttccccctgcacgctctgcggggagaaaaggaggggcctgcctggctagccctgaacctttcactt
tccatttctgcgccttttctgtcacccgggggcgctggaagttatcagtggctagtgaggtcccagctccctgatcctatgctctatttaaa
agataacctttggccttagactccgttagctcctatttcctgccttcagacaaacaggaaacttctgcagtcaggaaggctcctgtaccctt
cttcttttcctaggccctgtcctgcccgcatcctaccccatccccacctgaagtgaggctatccctgcagctgcagggcactaatgaccc
ttgacttctgctgggtcctaagtcctctcagcagtgggtgactgctgttgccaatacctcagactccagggaaagagaggaggccatca
ttctcactgtaccactaggcgcagttggatataggtgggaagaaaaggtgacttgttatagaagattaaaactagatttgatactgaacac
tgtcagtgattcattttttcaaagtgagacagcttccttgggaaatattgtcaatacctgctctttccaccccaaaatggaaagacttcattt
ccctggaatggggaagctgaagtgtagatggactcctttaaaactcatgcctcctctgccttcacctgaacattgaatagttcaatgattatt
ttagagataaagctattgggttgtggacagattaaataacttgatggagggaa

TABLE 8
Exemplary Spacer sequences

| Name | SEQ ID NO: | Sequence |
|---|---|---|
| S01 | 60 | CAGGGCAAUGGGGCCAUACG |
| S02 | 61 | UGACUCCAAACAGGGCAAUG |
| S03 | 62 | AUGACUCCAAACAGGGCAAU |
| S04 | 63 | UAUGACUCCAAACAGGGCAA |
| S05 | 64 | GUUGGCUAUGACUCCAAACA |
| S06 | 65 | CGUUGGCUAUGACUCCAAAC |
| S07 | 66 | CAGCUCUGGAUCCUGGUAUU |
| S08 | 67 | GCAGCUCUGGAUCCUGGUAU |
| S09 | 68 | CCCUUGGCAGCUCUGGAUCC |
| S10 | 69 | CACUCUGCCCUUGGCAGCUC |
| S11 | 6043 | UCGUUGGCUAUGACUCCAAA |
| S12 | 6044 | GUUGGGAGGGGCACUCUCGU |
| S13 | 6045 | GGUGCCACACAAGUUGGGAG |
| S14 | 6046 | CGUAUGGCCCCAUUGCCGUU |
| S15 | 6047 | GUAUUUGGUUUCUCCUCGUA |
| S16 | 6048 | CUGGUAUUGGGAGCUGUAUU |

TABLE 8a
Exemplary negative strand nick-guide RNA spacers

| SEQ ID NO: | Spacer sequence |
|---|---|
| 332 | AUUGUGGGACUCAUGGCCAA |
| 333 | CCACGCCAUUGUGGGACUCA |
| 334 | GGCACCUCCCACGCCAUUGU |
| 335 | UGGCACCUCCCACGCCAUUG |
| 336 | AGUGCCCCUCCCAACUUGUG |
| 337 | UAUGGCCCCAUUGCCCUGUU |
| 338 | GUAUUUgGUUUCUCCUCGUA |
| 339 | CAGCUCUGGAUCCUGGUAUU |
| 340 | GCAGCUCUGGAUCCUGGUAU |
| 341 | CCCUUGGCAGCUCUGGAUCC |
| 342 | CACUCUGCCCUUGGCAGCUC |
| 343 | AUGCCACUCCACUCUGCCCU |
| 344 | GCAGGGGUGGGUAGGCAGGU |
| 345 | UUUGGCAGGGGUGGGUAGGC |
| 346 | UUGCUUUGGCAGGGGUGGGU |
| 347 | CUUCUUGCUUUGGCAGGGGU |
| 5001 | GUAUUUGGUUUCUCAUCGUA |
| 5002 | GUAUUUGGUUUCUCGUCGUA |
| 5003 | GUAUUUGGUUUCUCUUCGUA |
| 5004 | UAUGGUCCCAUUGCCCUGUU |
| 5005 | UAUGGGCCCAUUGCCCUGUU |
| 5006 | UAUGGACCCAUUGCCCUGUU |
| 5007 | UAUGGCCCUAUUGCCCUGUU |
| 5008 | UAUGGCCCGAUUGCCCUGUU |
| 5009 | UAUGGCCCAAUUGCCCUGUU |
| 5010 | UAUGGCCCCAUUGCUCUGUU |
| 5011 | UAUGGCCCCAUUGCACUGUU |
| 5012 | UAUGGCCCCAUUGCGCUGUU |
| 5013 | ACCAAGCCUUCUUCUUGCUU |
| 5014 | AGCCUUCUUCUUGCUUUGGC |
| 5015 | GCCUUCUUCUUGCUUUGGCA |
| 5016 | CCUUCUUCUUGCUUUGGCAG |
| 5017 | UCUUCUUGCUUUGGCAGGGG |

TABLE 8b
Exemplary positive strand nick-guide RNA spacers

| SEQ ID NO: | Spacer sequence |
|---|---|
| 348 | AUUGGCCAUGAGUCCCACAA |
| 349 | CCAUGAGUCCCACAAUGGCG |
| 350 | CAUGAGUCCCACAAUGGCGU |
| 351 | GAGUCCCACAAUGGCGUGGG |
| 352 | GUGGGAGGUGCCACACAAGU |
| 353 | UGGGAGGUGCCACACAAGUU |
| 354 | GAGGUGCCACACAAGUUGGG |
| 355 | AGGUGCCACACAAGUUGGGA |
| 356 | GGUGCCACACAAGUUGGGAG |
| 357 | GUUGGGAGGGGCACUCUCGU |
| 358 | CGUUGGCUAUGACUCCAAAC |
| 359 | GUUGGCUAUGACUCCAAACA |
| 360 | UAUGACUCCAAACAGGGCAA |
| 361 | AUGACUCCAAACAGGGCAAU |
| 362 | UGACUCCAAACAGGGCAAUG |
| 363 | CAGGGCAAUGGGGCCAUACG |
| 364 | CAAAUACAGCUCCCAAUACC |
| 365 | ACCAGGAUCCAGAGCUGCCA |
| 366 | CCAGGAUCCAGAGCUGCCAA |
| 367 | CAGAGCUGCCAAGGGCAGAG |
| 368 | CUGCCAAGGGCAGAGUGGAG |
| 369 | AGUGGAGUGGCAUUCAGAGU |
| 370 | CCCCUGCCAAAGCAAGAAGA |
| 5018 | CUAGGAUCCAGAGCUGCCAA |
| 5019 | CAAGGAUCCAGAGCUGCCAA |
| 5020 | CGAGGAUCCAGAGCUGCCAA |
| 5021 | ACUAGGAUCCAGAGCUGCCA |
| 5022 | ACAAGGAUCCAGAGCUGCCA |
| 5023 | ACGAGGAUCCAGAGCUGCCA |
| 5024 | UGACUCCAAACAGAGCAAUG |
| 5025 | UGACUCCAAACAGUGCAAUG |
| 5026 | UGACUCCAAACAGCGCAAUG |
| 5027 | AUGACUCCAAACAGAGCAAU |
| 5028 | AUGACUCCAAACAGUGCAAU |
| 5029 | AUGACUCCAAACAGCGCAAU |
| 5030 | CAAAUACAGCUCCUAAUACC |
| 5031 | CAAAUACAGCUCCGAAUACC |
| 5032 | CAAAUACAGCUCCAAAUACC |
| 5033 | CAAAUACAGCUCCCAAUACU |
| 5034 | CAAAUACAGCUCCCAAUACG |
| 5035 | CAAAUACAGCUCCCAAUACA |
| 6083 | GCCAAAGCAAGAAGAAGGCU |

TABLE 8c
Exemplary negative strand nick-guide RNA spacers

| SEQ ID NO: | Spacer sequence |
|---|---|
| 521 | AUUGUGGGACUCAUGGCCAA |
| 522 | CCACGCCAUUGUGGGACUCA |
| 523 | GGCACCUCCCACGCCAUUGU |
| 524 | UGGCACCUCCCACGCCAUUG |
| 525 | AGUGCCCCUCCCAACUUGUG |
| 526 | UAUGGCCCCAUUGCCcuGUU |
| 527 | GUAUUUGGUUUCUCCUCGUA |
| 528 | CUGGUAUUGGGAGCUGUAUU |
| 529 | CAGCUCUGGAUCCUGGUAUU |
| 530 | GCAGCUCUGGAUCCUGGUAU |
| 531 | CCCUUGGCAGCUCUGGAUCC |
| 532 | CACUCUGCCCUUGGCAGCUC |
| 533 | AUGCCACUCCACUCUGCCCU |
| 3201 | UAUGGCCCCAUUGCUCUGUU |
| 3202 | UAUGGCCCCAUUGCACUGUU |
| 3203 | UAUGGCCCCAUUGCGCUGUU |
| 3204 | ACCAAGCCUUCUUCUUGCUU |
| 3205 | AGCCUUCUUCUUGCUUUGGC |
| 3206 | GCCUUCUUCUUGCUUUGGCA |
| 3207 | CCUUCUUCUUGCUUUGGCAG |
| 3208 | UCUUCUUGCUUUGGCAGGGG |
| 3209 | GCAGGGGUGGGUAGGCAGGU |
| 3210 | UUUGGCAGGGGUGGGUAGGC |
| 3212 | GUAUUUGGUUUCUCAUCGUA |
| 3213 | GUAUUUGGUUUCUCGUCGUA |
| 3214 | GUAUUUGGUUUCUCUUCGUA |

TABLE 8d
Exemplary positive strand nick-guide RNA spacers

| SEQ ID NO: | Spacer sequence |
|---|---|
| 534 | UAGAAGUUAACACUUACCAU |
| 535 | AUUGGCCAUGAGUCCCACAA |
| 536 | CCAUGAGUCCCACAAUGGCG |
| 537 | CAUGAGUCCCACAAUGGCGU |
| 538 | GAGUCCCACAAUGGCGUGGG |
| 539 | GUGGGAGGUGCCACACAAGU |
| 540 | UGGGAGGUGCCACACAAGUU |
| 541 | GAGGUGCCACACAAGUUGGG |
| 542 | AGGUGCCACACAAGUUGGGA |
| 543 | GGUGCCACACAAGUUGGGAG |
| 544 | GUUGGGAGGGGCACUCUCGU |
| 545 | GUUGGCUAUGACUCCAAACa |
| 546 | UAUGACUCCAAACagGGCAA |
| 547 | AUGACUCCAAACagGGCAAU |
| 548 | UGACUCCAAACagGGCAAUG |
| 549 | CagGGCAAUGGGGCCAUACG |
| 550 | CAAAUACAGCUCCCAAUACC |
| 551 | ACCAGGAUCCAGAGCUGCCA |
| 552 | CCAGGAUCCAGAGCUGCCAA |
| 553 | CAGAGCUGCCAAGGGCAGAG |
| 554 | CUGCCAAGGGCAGAGUGGAG |
| 555 | AGUGGAGUGGCAUUCAGAGU |
| 3211 | CGUUGGCUAUGACUCCAAAC |
| 3215 | CCCCUGCCAAAGCAAGAAGA |

TABLE 9a
Exemplary RTT sequences for Spacer S01

| SEQ ID | | SEQ ID | |
|---|---|---|---|
| NO: | Sequence | NO: | Sequence |
| 70 | UgGUUUCUCCUCGU | 96 | GCUGUAUUUgGUUUCUcauCGU |
| 71 | UUgGUUUCaguUCGU | 97 | GCUGUAUUUgGUUUCUCCUCGU |
| 72 | UUgGUUUCUcuuCGU | 98 | AGCUGUAUUUgGUUUCUCCUCGU |
| 73 | UUgGUUUCUcguCGU | 99 | GAGCUGUAUUUgGUUUCUCCUCGU |
| 74 | UUgGUUUCagcUCGU | 100 | GGAGCUGUAUUUgGUUUCaguUCGU |
| 75 | UUgGUUUCUcauCGU | 101 | GGAGCUGUAUUUgGUUUCUcuuCGU |
| 76 | UUgGUUUCUCCUCGU | 102 | GGAGCUGUAUUUgGUUUCUcguCGU |
| 77 | UUUgGUUUCUCCUCGU | 103 | GGAGCUGUAUUUgGUUUCagcUCGU |
| 78 | AUUUgGUUUCaguUCGU | 104 | GGAGCUGUAUUUgGUUUCUcauCGU |
| 79 | AUUUgGUUUCUcuuCGU | 105 | GGAGCUGUAUUUgGUUUCUCCUCGU |
| 80 | AUUUgGUUUCUcguCGU | 106 | GGGAGCUGUAUUUgGUUUCUCCUCGU |
| 81 | AUUUgGUUUCagcUCGU | 107 | UGGGAGCUGUAUUUgGUUUCaguUCGU |
| 82 | AUUUgGUUUCUcauCGU | 108 | UGGGAGCUGUAUUUgGUUUCUcuuCGU |
| 83 | AUUUgGUUUCUCCUCGU | 109 | UGGGAGCUGUAUUUgGUUUCUcguCGU |
| 84 | UAUUUgGUUUCUCCUCGU | 110 | UGGGAGCUGUAUUUgGUUUCagcUCGU |
| 85 | GUAUUUgGUUUCaguUCGU | 111 | UGGGAGCUGUAUUUgGUUUCUcauCGU |
| 86 | GUAUUUgGUUUCUcuuCGU | 112 | UGGGAGCUGUAUUUgGUUUCUCCUCGU |
| 87 | GUAUUUgGUUUCUcguCGU | 113 | UUGGGAGCUGUAUUUgGUUUCUCCUCGU |
| 88 | GUAUUUgGUUUCagcUCGU | 114 | AUUGGGAGCUGUAUUUgGUUUCUCCUCGU |
| 89 | GUAUUUgGUUUCUcauCGU | 115 | UAUUGGGAGCUGUAUUUgGUUUCUCCUCGU |
| 90 | GUAUUUgGUUUCUCCUCGU | 116 | GUAUUGGGAGCUGUAUUUgGUUUCUCCUCGU |
| 91 | UGUAUUUgGUUUCUCCUCGU | 117 | GGUAUUGGGAGCUGUAUUUgGUUUCUCCUCGU |
| 92 | GCUGUAUUUgGUUUCaguUCGU | 118 | UGGUAUUGGGAGCUGUAUUUgGUUUCUCCUCGU |
| 93 | GCUGUAUUUgGUUUCUcuuCGU | 119 | UCCUGGUAUUGGGAGCUGUAUUUgGUUUCUCCUCGU |
| 94 | GCUGUAUUUgGUUUCUcguCGU | 120 | AUCCUGGUAUUGGGAGCUGUAUUUgGUUUCUCCUCGU |
| 95 | GCUGUAUUUgGUUUCagcUCGU | 3022 | CUGUAUUUgGUUUCUcguCGU |
| 3014 | UAUUUgGUUUCUcuuCGU | 3023 | CUGUAUUUGGUUUCUCCUCGU |
| 3012 | UAUUUgGUUUCUcguCGU | 3024 | CUGUAUUUGGUUUCUCAUCGU |
| 3013 | UAUUUGGUUUCUCAUCGU | 3101 | CUGUAUUUgGUUUCUCCUCGU |
| 3016 | GUAUUUgGUUUCUcguCGU | 3025 | GCUGUAUUUgGUUUCUcuuCGU |
| 3017 | GUAUUUGGUUUCUCAUCGU | 3026 | GCUGUAUUUgGUUUCUcguCGU |
| 3018 | UGUAUUUgGUUUCUcuuCGU | 3027 | GCUGUAUUUGGUUUCUCAUCGU |
| 3019 | UGUAUUUgGUUUCUcguCGU | 3028 | AGCUGUAUUUgGUUUCUcuuCGU |
| 3003 | UGUAUUUGGUUUCUCAUCGU | 3029 | AGCUGUAUUUgGUUUCUcguCGU |
| 3020 | UGUAUUUGGUUUCUCAUCGU | 3030 | AGCUGUAUUUGGUUUCUCAUCGU |
| 3021 | CUGUAUUUgGUUUCUcuuCGU | | |

TABLE 9b
Exemplary PBS sequences for Spacer S01

| | Sequence |
|---|---|
| SEQ REF NO: 242 | AUGGCCC |
| SEQ REF NO: 243 | AUGGCCCC |
| SEQ REF NO: 244 | AUGGCCCCA |
| SEQ ID NO: 245 | AUGGCCCCAU |
| SEQ ID NO: 246 | AUGGCCCCAUU |
| SEQ ID NO: 247 | AUGGCCCCAUUG |
| SEQ ID NO: 248 | AUGGCCCCAUUGC |
| SEQ ID NO: 249 | AUGGCCCCAUUGCC |
| SEQ ID NO: 250 | AUGGCCCCAUUGCCC |

TABLE 9c
Exemplary RTT/PBS Combinations with Spacer S01

| PEG # | RTT | PBS | PEG # | RTT | PBS | PEG # | RTT | PBS | PEG # | RTT | PBS |
|---|---|---|---|---|---|---|---|---|---|---|---|
| PEG-0001 | 70 | 242 | PEG-0039 | 84 | 244 | PEG-0077 | 98 | 246 | PEG-0115 | 112 | 248 |
| PEG-0002 | 70 | 243 | PEG-0040 | 84 | 245 | PEG-0078 | 98 | 247 | PEG-0116 | 112 | 249 |
| PEG-0003 | 70 | 244 | PEG-0041 | 84 | 246 | PEG-0079 | 98 | 248 | PEG-0117 | 112 | 250 |
| PEG-0004 | 70 | 245 | PEG-0042 | 84 | 247 | PEG-0080 | 98 | 249 | PEG-0118 | 113 | 242 |
| PEG-0005 | 70 | 246 | PEG-0043 | 84 | 248 | PEG-0081 | 98 | 250 | PEG-0119 | 113 | 243 |
| PEG-0006 | 70 | 247 | PEG-0044 | 84 | 249 | PEG-0082 | 99 | 242 | PEG-0120 | 113 | 244 |
| PEG-0007 | 70 | 248 | PEG-0045 | 84 | 250 | PEG-0083 | 99 | 243 | PEG-0121 | 113 | 245 |
| PEG-0008 | 70 | 249 | PEG-0693 | 85 | 243 | PEG-0084 | 99 | 244 | PEG-0122 | 113 | 246 |
| PEG-0009 | 70 | 250 | PEG-0694 | 85 | 245 | PEG-0085 | 99 | 245 | PEG-0123 | 113 | 247 |
| PEG-0685 | 71 | 243 | PEG-0695 | 85 | 247 | PEG-0086 | 99 | 246 | PEG-0124 | 113 | 248 |
| PEG-0686 | 71 | 245 | PEG-0696 | 85 | 249 | PEG-0087 | 99 | 247 | PEG-0125 | 113 | 249 |
| PEG-0687 | 71 | 247 | PEG-0621 | 86 | 243 | PEG-0088 | 99 | 248 | PEG-0126 | 113 | 250 |
| PEG-0688 | 71 | 249 | PEG-0622 | 86 | 245 | PEG-0089 | 99 | 249 | PEG-0127 | 114 | 242 |
| PEG-0613 | 72 | 243 | PEG-0623 | 86 | 247 | PEG-0090 | 99 | 250 | PEG-0128 | 114 | 243 |
| PEG-0614 | 72 | 245 | PEG-0624 | 86 | 249 | PEG-0701 | 100 | 243 | PEG-0129 | 114 | 244 |
| PEG-0615 | 72 | 247 | PEG-0669 | 87 | 243 | PEG-0702 | 100 | 245 | PEG-0130 | 114 | 245 |
| PEG-0616 | 72 | 249 | PEG-0670 | 87 | 245 | PEG-0703 | 100 | 247 | PEG-0131 | 114 | 246 |
| PEG-0661 | 73 | 243 | PEG-0671 | 87 | 247 | PEG-0704 | 100 | 249 | PEG-0132 | 114 | 247 |
| PEG-0662 | 73 | 245 | PEG-0672 | 87 | 249 | PEG-0629 | 101 | 243 | PEG-0133 | 114 | 248 |
| PEG-0663 | 73 | 247 | PEG-0717 | 88 | 243 | PEG-0630 | 101 | 245 | PEG-0134 | 114 | 249 |
| PEG-0664 | 73 | 249 | PEG-0718 | 88 | 245 | PEG-0631 | 101 | 247 | PEG-0135 | 114 | 250 |
| PEG-0709 | 74 | 243 | PEG-0719 | 88 | 247 | PEG-0632 | 101 | 249 | PEG-0136 | 115 | 242 |
| PEG-0710 | 74 | 245 | PEG-0720 | 88 | 249 | PEG-0677 | 102 | 243 | PEG-0137 | 115 | 243 |
| PEG-0711 | 74 | 247 | PEG-0645 | 89 | 243 | PEG-0678 | 102 | 245 | PEG-0138 | 115 | 244 |
| PEG-0712 | 74 | 249 | PEG-0646 | 89 | 245 | PEG-0679 | 102 | 247 | PEG-0139 | 115 | 245 |
| PEG-0637 | 75 | 243 | PEG-0647 | 89 | 247 | PEG-0680 | 102 | 249 | PEG-0140 | 115 | 246 |
| PEG-0638 | 75 | 245 | PEG-0648 | 89 | 249 | PEG-0725 | 103 | 243 | PEG-0141 | 115 | 247 |
| PEG-0639 | 75 | 247 | PEG-0046 | 90 | 242 | PEG-0726 | 103 | 245 | PEG-0142 | 115 | 248 |
| PEG-0640 | 75 | 249 | PEG-0047 | 90 | 243 | PEG-0727 | 103 | 247 | PEG-0143 | 115 | 249 |
| PEG-0010 | 76 | 242 | PEG-0048 | 90 | 244 | PEG-0728 | 103 | 249 | PEG-0144 | 115 | 250 |
| PEG-0011 | 76 | 243 | PEG-0049 | 90 | 245 | PEG-0653 | 104 | 243 | PEG-0145 | 116 | 242 |
| PEG-0012 | 76 | 244 | PEG-0050 | 90 | 246 | PEG-0654 | 104 | 245 | PEG-0146 | 116 | 243 |
| PEG-0013 | 76 | 245 | PEG-0051 | 90 | 247 | PEG-0655 | 104 | 247 | PEG-0147 | 116 | 244 |
| PEG-0014 | 76 | 246 | PEG-0052 | 90 | 248 | PEG-0656 | 104 | 249 | PEG-0148 | 116 | 245 |
| PEG-0015 | 76 | 247 | PEG-0053 | 90 | 249 | PEG-0091 | 105 | 242 | PEG-0149 | 116 | 246 |
| PEG-0016 | 76 | 248 | PEG-0054 | 90 | 250 | PEG-0092 | 105 | 243 | PEG-0150 | 116 | 247 |
| PEG-0017 | 76 | 249 | PEG-0055 | 91 | 242 | PEG-0093 | 105 | 244 | PEG-0151 | 116 | 248 |
| PEG-0018 | 76 | 250 | PEG-0056 | 91 | 243 | PEG-0094 | 105 | 245 | PEG-0152 | 116 | 249 |
| PEG-0019 | 77 | 242 | PEG-0057 | 91 | 244 | PEG-0095 | 105 | 246 | PEG-0153 | 116 | 250 |
| PEG-0020 | 77 | 243 | PEG-0058 | 91 | 245 | PEG-0096 | 105 | 247 | PEG-0154 | 117 | 242 |
| PEG-0021 | 77 | 244 | PEG-0059 | 91 | 246 | PEG-0097 | 105 | 248 | PEG-0155 | 117 | 243 |
| PEG-0022 | 77 | 245 | PEG-0060 | 91 | 247 | PEG-0098 | 105 | 249 | PEG-0156 | 117 | 244 |
| PEG-0023 | 77 | 246 | PEG-0061 | 91 | 248 | PEG-0099 | 105 | 250 | PEG-0157 | 117 | 245 |
| PEG-0024 | 77 | 247 | PEG-0062 | 91 | 249 | PEG-0100 | 106 | 242 | PEG-0158 | 117 | 246 |
| PEG-0025 | 77 | 248 | PEG-0063 | 91 | 250 | PEG-0101 | 106 | 243 | PEG-0159 | 117 | 247 |
| PEG-0026 | 77 | 249 | PEG-0697 | 92 | 243 | PEG-0102 | 106 | 244 | PEG-0160 | 117 | 248 |
| PEG-0027 | 77 | 250 | PEG-0698 | 92 | 245 | PEG-0103 | 106 | 245 | PEG-0161 | 117 | 249 |
| PEG-0689 | 78 | 243 | PEG-0699 | 92 | 247 | PEG-0104 | 106 | 246 | PEG-0162 | 117 | 250 |
| PEG-0690 | 78 | 245 | PEG-0700 | 92 | 249 | PEG-0105 | 106 | 247 | PEG-0163 | 118 | 242 |
| PEG-0691 | 78 | 247 | PEG-0625 | 93 | 243 | PEG-0106 | 106 | 248 | PEG-0164 | 118 | 243 |
| PEG-0692 | 78 | 249 | PEG-0626 | 93 | 245 | PEG-0107 | 106 | 249 | PEG-0165 | 118 | 244 |
| PEG-0617 | 79 | 243 | PEG-0627 | 93 | 247 | PEG-0108 | 106 | 250 | PEG-0166 | 118 | 245 |
| PEG-0618 | 79 | 245 | PEG-0628 | 93 | 249 | PEG-0705 | 107 | 243 | PEG-0167 | 118 | 246 |
| PEG-0619 | 79 | 247 | PEG-0673 | 94 | 243 | PEG-0706 | 107 | 245 | PEG-0168 | 118 | 247 |
| PEG-0620 | 79 | 249 | PEG-0674 | 94 | 245 | PEG-0707 | 107 | 247 | PEG-0169 | 118 | 248 |
| PEG-0665 | 80 | 243 | PEG-0675 | 94 | 247 | PEG-0708 | 107 | 249 | PEG-0170 | 118 | 249 |
| PEG-0666 | 80 | 245 | PEG-0676 | 94 | 249 | PEG-0633 | 108 | 243 | PEG-0171 | 118 | 250 |
| PEG-0667 | 80 | 247 | PEG-0721 | 95 | 243 | PEG-0634 | 108 | 245 | PEG-0172 | 119 | 242 |
| PEG-0668 | 80 | 249 | PEG-0722 | 95 | 245 | PEG-0635 | 108 | 247 | PEG-0173 | 119 | 243 |
| PEG-0713 | 81 | 243 | PEG-0723 | 95 | 247 | PEG-0636 | 108 | 249 | PEG-0174 | 119 | 244 |
| PEG-0714 | 81 | 245 | PEG-0724 | 95 | 249 | PEG-0681 | 109 | 243 | PEG-0175 | 119 | 245 |
| PEG-0715 | 81 | 247 | PEG-0649 | 96 | 243 | PEG-0682 | 109 | 245 | PEG-0176 | 119 | 246 |
| PEG-0716 | 81 | 249 | PEG-0650 | 96 | 245 | PEG-0683 | 109 | 247 | PEG-0177 | 119 | 247 |
| PEG-0641 | 82 | 243 | PEG-0651 | 96 | 247 | PEG-0684 | 109 | 249 | PEG-0178 | 119 | 248 |
| PEG-0642 | 82 | 245 | PEG-0652 | 96 | 249 | PEG-0729 | 110 | 243 | PEG-0179 | 119 | 249 |
| PEG-0643 | 82 | 247 | PEG-0064 | 97 | 242 | PEG-0730 | 110 | 245 | PEG-0180 | 119 | 250 |
| PEG-0644 | 82 | 249 | PEG-0065 | 97 | 243 | PEG-0731 | 110 | 247 | PEG-0181 | 120 | 242 |
| PEG-0028 | 83 | 242 | PEG-0066 | 97 | 244 | PEG-0732 | 110 | 249 | PEG-0182 | 120 | 243 |
| PEG-0029 | 83 | 243 | PEG-0067 | 97 | 245 | PEG-0657 | 111 | 243 | PEG-0183 | 120 | 244 |
| PEG-0030 | 83 | 244 | PEG-0068 | 97 | 246 | PEG-0658 | 111 | 245 | PEG-0184 | 120 | 245 |
| PEG-0031 | 83 | 245 | PEG-0069 | 97 | 247 | PEG-0659 | 111 | 247 | PEG-0185 | 120 | 246 |
| PEG-0032 | 83 | 246 | PEG-0070 | 97 | 248 | PEG-0660 | 111 | 249 | PEG-0186 | 120 | 247 |
| PEG-0033 | 83 | 247 | PEG-0071 | 97 | 249 | PEG-0109 | 112 | 242 | PEG-0187 | 120 | 248 |
| PEG-0034 | 83 | 248 | PEG-0072 | 97 | 250 | PEG-0110 | 112 | 243 | PEG-0188 | 120 | 249 |
| PEG-0035 | 83 | 249 | PEG-0073 | 98 | 242 | PEG-0111 | 112 | 244 | PEG-0189 | 120 | 250 |
| PEG-0036 | 83 | 250 | PEG-0074 | 98 | 243 | PEG-0112 | 112 | 245 | PEG-4216 | 3028 | 249 |
| PEG-0037 | 84 | 242 | PEG-0075 | 98 | 244 | PEG-0113 | 112 | 246 | PEG-4150 | 3029 | 249 |
| PEG-0038 | 84 | 243 | PEG-0076 | 98 | 245 | PEG-0114 | 112 | 247 | PEG-4183 | 3030 | 249 |
| PEG-4184 | 3014 | 243 | PEG-4125 | 94 | 244 | PEG-4200 | 3021 | 246 | PEG-4142 | 87 | 248 |
| PEG-4117 | 3012 | 243 | PEG-4158 | 96 | 244 | PEG-4134 | 3022 | 246 | PEG-4175 | 89 | 248 |
| PEG-4151 | 3013 | 243 | PEG-4193 | 3028 | 244 | PEG-4167 | 3024 | 246 | PEG-4209 | 3018 | 248 |
| PEG-4185 | 3018 | 243 | PEG-4126 | 3029 | 244 | PEG-4113 | 3101 | 246 | PEG-4143 | 3019 | 248 |
| PEG-4118 | 3019 | 243 | PEG-4159 | 3030 | 244 | PEG-4201 | 93 | 246 | PEG-4176 | 3003 | 248 |
| PEG-4006 | 3003 | 243 | PEG-4194 | 3014 | 245 | PEG-4135 | 94 | 246 | PEG-4210 | 3021 | 248 |
| PEG-4186 | 3021 | 243 | PEG-4127 | 3012 | 245 | PEG-4168 | 96 | 246 | PEG-4144 | 3022 | 248 |
| PEG-4119 | 3022 | 243 | PEG-4160 | 3013 | 245 | PEG-4202 | 3028 | 246 | PEG-4177 | 3024 | 248 |
| PEG-4152 | 3024 | 243 | PEG-4195 | 3018 | 245 | PEG-4136 | 3029 | 246 | PEG-4115 | 3101 | 248 |
| PEG-4110 | 3101 | 243 | PEG-4128 | 3019 | 245 | PEG-4169 | 3030 | 246 | PEG-4211 | 93 | 248 |
| PEG-4187 | 3028 | 243 | PEG-4161 | 3003 | 245 | PEG-4203 | 3014 | 247 | PEG-4145 | 94 | 248 |
| PEG-4120 | 3029 | 243 | PEG-4196 | 3021 | 245 | PEG-4137 | 3012 | 247 | PEG-4178 | 96 | 248 |
| PEG-4153 | 3030 | 243 | PEG-4129 | 3022 | 245 | PEG-4170 | 3013 | 247 | PEG-4212 | 3028 | 248 |
| PEG-4188 | 3014 | 244 | PEG-4162 | 3024 | 245 | PEG-4204 | 3018 | 247 | PEG-4146 | 3029 | 248 |
| PEG-4121 | 3012 | 244 | PEG-4112 | 3101 | 245 | PEG-4138 | 3019 | 247 | PEG-4179 | 3030 | 248 |
| PEG-4154 | 3013 | 244 | PEG-4197 | 3028 | 245 | PEG-4171 | 3003 | 247 | PEG-4213 | 3014 | 249 |
| PEG-4189 | 86 | 244 | PEG-4130 | 3029 | 245 | PEG-4205 | 3021 | 247 | PEG-4147 | 3012 | 249 |
| PEG-4122 | 87 | 244 | PEG-4163 | 3030 | 245 | PEG-4139 | 3022 | 247 | PEG-4180 | 3013 | 249 |
| PEG-4155 | 89 | 244 | PEG-4198 | 3014 | 246 | PEG-4172 | 3024 | 247 | PEG-4214 | 3018 | 249 |
| PEG-4190 | 3018 | 244 | PEG-4131 | 3012 | 246 | PEG-4114 | 3101 | 247 | PEG-4148 | 3019 | 249 |
| PEG-4123 | 3019 | 244 | PEG-4164 | 3013 | 246 | PEG-4206 | 3028 | 247 | PEG-4181 | 3003 | 249 |
| PEG-4156 | 3003 | 244 | PEG-4005 | 86 | 246 | PEG-4140 | 3029 | 247 | PEG-4215 | 3021 | 249 |
| PEG-4191 | 3021 | 244 | PEG-4132 | 87 | 246 | PEG-4173 | 3030 | 247 | PEG-4149 | 3022 | 249 |
| PEG-4124 | 3022 | 244 | PEG-4165 | 89 | 246 | PEG-4207 | 3014 | 248 | PEG-4182 | 3024 | 249 |
| PEG-4157 | 3024 | 244 | PEG-4199 | 3018 | 246 | PEG-4141 | 3012 | 248 | PEG-4116 | 3101 | 249 |
| PEG-4111 | 3101 | 244 | PEG-4133 | 3019 | 246 | PEG-4174 | 3013 | 248 | | | |
| PEG-4192 | 93 | 244 | PEG-4166 | 3003 | 246 | PEG-4208 | 86 | 248 | | | |

TABLE 10a
Exemplary RTT sequences for Spacer S02

| SEQ | | SEQ | |
|---|---|---|---|
| ID NO: | Sequence | ID NO: | Sequence |
| 121 | UgGUUUCUCCUCGUAUGGC | 134 | GCUGUAUUUgGUUUCUCCUCGUAUGGCCCCAU |
| | CCCAU | | |
| 122 | UUgGUUUCUCCUCGUAUGG | 135 | AGCUGUAUUUgGUUUCUCCUCGUAUGGuCCCAU |
| | CCCCAU | | |
| 123 | UUUgGUUUCUCCUCGUAUG | 136 | AGCUGUAUUUgGUUUCUCCUCGUAUGGgCCCAU |
| | GuCCCAU | | |
| 124 | UUUgGUUUCUCCUCGUAUG | 137 | AGCUGUAUUUgGUUUCUCCUCGUAUGGCCCCAU |
| | GgCCCAU | | |
| 125 | UUUgGUUUCUCCUCGUAUG | 138 | AGCUGUAUUUgGUUUCUCCUCGUAUGGaCCCAU |
| | GCCCCAU | | |
| 126 | UUUgGUUUCUCCUCGUAUG | 139 | GAGCUGUAUUUgGUUUCUCCUCGUAUGGCCCCA |
| | GaCCCAU | | U |
| 127 | AUUUgGUUUCUCCUCGUAU | 140 | GGAGCUGUAUUUgGUUUCUCCUCGUAUGGCCCC |
| | GGCCCCAU | | AU |
| 128 | UAUUUgGUUUCUCCUCGUA | 141 | GGGAGCUGUAUUUgGUUUCUCCUCGUAUGGuCC |
| | UGGCCCCAU | | CAU |
| 129 | GUAUUUgGUUUCUCCUCGU | 142 | GGGAGCUGUAUUUgGUUUCUCCUCGUAUGGgCC |
| | AUGGuCCCAU | | CAU |
| 130 | GUAUUUgGUUUCUCCUCGU | 143 | GGGAGCUGUAUUUgGUUUCUCCUCGUAUGGCCC |
| | AUGGgCCCAU | | CAU |
| 131 | GUAUUUgGUUUCUCCUCGU | 144 | GGGAGCUGUAUUUgGUUUCUCCUCGUAUGGaCC |
| | AUGGCCCCAU | | CAU |
| 132 | GUAUUUgGUUUCUCCUCGU | 145 | UGGGAGCUGUAUUUgGUUUCUCCUCGUAUGGCC |
| | AUGGaCCCAU | | CCAU |
| 133 | UGUAUUUgGUUUCUCCUCG | 3053 | GCUGUAUUUGGUUUCUCCUCGUAUGGGCCCAU |
| | UAUGGCCCCAU | | |
| 3035 | UAUUUGGUUUCUCCUCGUA | 3054 | GCUGUAUUUGGUUUCUCCUCGUAUGGCCCCAU |
| | UGGUCCCAU | | |
| 3036 | UAUUUGGUUUCUCCUCGUA | 3055 | GCUGUAUUUGGUUUCUCCUCGUAUGGACCCAU |
| | UGGGCCCAU | | |
| 3037 | UAUUUGGUUUCUCCUCGUA | 3056 | AGCUGUAUUUGGUUUCUCCUCGUAUGGUCCCAU |
| | UGGCCCCAU | | |
| 3038 | UAUUUGGUUUCUCCUCGUA | 3057 | AGCUGUAUUUGGUUUCUCCUCGUAUGGGCCCAU |
| | UGGACCCAU | | |
| 3039 | GUAUUUGGUUUCUCCUCGU | 3058 | AGCUGUAUUUGGUUUCUCCUCGUAUGGCCCCAU |
| | AUGGUCCCAU | | |
| 3040 | GUAUUUGGUUUCUCCUCGU | 3059 | AGCUGUAUUUGGUUUCUCCUCGUAUGGACCCAU |
| | AUGGGCCCAU | | |
| 3041 | GUAUUUGGUUUCUCCUCGU | 3060 | GAGCUGUAUUUGGUUUCUCCUCGUAUGGUCCCAU |
| | AUGGCCCCAU | | |
| 3042 | GUAUUUGGUUUCUCCUCGU | 3061 | GAGCUGUAUUUGGUUUCUCCUCGUAUGGGCCCAU |
| | AUGGACCCAU | | |
| 3043 | UGUAUUUGGUUUCUCCUCG | 3062 | GAGCUGUAUUUGGUUUCUCCUCGUAUGGCCCCAU |
| | UAUGGUCCCAU | | |
| 3004 | UGUAUUUGGUUUCUCCUCG | 3063 | GAGCUGUAUUUGGUUUCUCCUCGUAUGGACCCAU |
| | UAUGGGCCCAU | | |
| 3044 | UGUAUUUGGUUUCUCCUCG | 3064 | GGAGCUGUAUUUGGUUUCUCCUCGUAUGGUCCCAU |
| | UAUGGGCCCAU | | |
| 3045 | UGUAUUUGGUUUCUCCUCG | 3065 | GGAGCUGUAUUUGGUUUCUCCUCGUAUGGGCCCAU |
| | UAUGGCCCCAU | | |
| 3046 | UGUAUUUGGUUUCUCCUCG | 3066 | GGAGCUGUAUUUGGUUUCUCCUCGUAUGGCCCCAU |
| | UAUGGACCCAU | | |
| 3047 | CUGUAUUUGGUUUCUCCUC | 3005 | GGAGCUGUAUUUGGUUUCUCCUCGUAUGGACCCAU |
| | GUAUGGUCCCAU | | |

TABLE 10b
Exemplary PBS sequences for Spacer S02

| | Sequence |
|---|---|
| SEQ REF NO: 251 | UGCCCUG |
| SEQ REF NO: 252 | UGCCCUGU |
| SEQ REF NO: 253 | UGCCCUGUU |
| SEQ ID NO: 254 | UGCCCUGUUU |
| SEQ ID NO: 255 | UGCCCUGUUUG |
| SEQ ID NO: 256 | UGCCCUGUUUGG |
| SEQ ID NO: 257 | UGCCCUGUUUGGA |
| SEQ ID NO: 258 | UGCCCUGUUUGGAG |
| SEQ ID NO: 259 | UGCCCUGUUUGGAGU |

TABLE 10c
Exemplary RTT/PBS Combinations with Spacer S02

| PEG # | RTT | PBS | PEG # | RTT | PBS | PEG # | RTT | PBS | PEG # | RTT | PBS |
|---|---|---|---|---|---|---|---|---|---|---|---|
| PEG-0190 | 121 | 251 | PEG-0220 | 127 | 254 | PEG-0250 | 133 | 257 | PEG-0280 | 140 | 251 |
| PEG-0191 | 121 | 252 | PEG-0221 | 127 | 255 | PEG-0251 | 133 | 258 | PEG-0281 | 140 | 252 |
| PEG-0192 | 121 | 253 | PEG-0222 | 127 | 256 | PEG-0252 | 133 | 259 | PEG-0282 | 140 | 253 |
| PEG-0193 | 121 | 254 | PEG-0223 | 127 | 257 | PEG-0253 | 134 | 251 | PEG-0283 | 140 | 254 |
| PEG-0194 | 121 | 255 | PEG-0224 | 127 | 258 | PEG-0254 | 134 | 252 | PEG-0284 | 140 | 255 |
| PEG-0195 | 121 | 256 | PEG-0225 | 127 | 259 | PEG-0255 | 134 | 253 | PEG-0285 | 140 | 256 |
| PEG-0196 | 121 | 257 | PEG-0226 | 128 | 251 | PEG-0256 | 134 | 254 | PEG-0286 | 140 | 257 |
| PEG-0197 | 121 | 258 | PEG-0227 | 128 | 252 | PEG-0257 | 134 | 255 | PEG-0287 | 140 | 258 |
| PEG-0198 | 121 | 259 | PEG-0228 | 128 | 253 | PEG-0258 | 134 | 256 | PEG-0288 | 140 | 259 |
| PEG-0199 | 122 | 251 | PEG-0229 | 128 | 254 | PEG-0259 | 134 | 257 | PEG-0761 | 141 | 252 |
| PEG-0200 | 122 | 252 | PEG-0230 | 128 | 255 | PEG-0260 | 134 | 258 | PEG-0762 | 141 | 254 |
| PEG-0201 | 122 | 253 | PEG-0231 | 128 | 256 | PEG-0261 | 134 | 259 | PEG-0763 | 141 | 256 |
| PEG-0202 | 122 | 254 | PEG-0232 | 128 | 257 | PEG-0757 | 135 | 252 | PEG-0764 | 141 | 258 |
| PEG-0203 | 122 | 255 | PEG-0233 | 128 | 258 | PEG-0758 | 135 | 254 | PEG-0777 | 142 | 252 |
| PEG-0204 | 122 | 256 | PEG-0234 | 128 | 259 | PEG-0759 | 135 | 256 | PEG-0778 | 142 | 254 |
| PEG-0205 | 122 | 257 | PEG-0753 | 129 | 252 | PEG-0760 | 135 | 258 | PEG-0779 | 142 | 256 |
| PEG-0206 | 122 | 258 | PEG-0754 | 129 | 254 | PEG-0773 | 136 | 252 | PEG-0780 | 142 | 258 |
| PEG-0207 | 122 | 259 | PEG-0755 | 129 | 256 | PEG-0774 | 136 | 254 | PEG-0289 | 143 | 251 |
| PEG-0749 | 123 | 252 | PEG-0756 | 129 | 258 | PEG-0775 | 136 | 256 | PEG-0290 | 143 | 252 |
| PEG-0750 | 123 | 254 | PEG-0769 | 130 | 252 | PEG-0776 | 136 | 258 | PEG-0291 | 143 | 253 |
| PEG-0751 | 123 | 256 | PEG-0770 | 130 | 254 | PEG-0262 | 137 | 251 | PEG-0292 | 143 | 254 |
| PEG-0752 | 123 | 258 | PEG-0771 | 130 | 256 | PEG-0263 | 137 | 252 | PEG-0293 | 143 | 255 |
| PEG-0765 | 124 | 252 | PEG-0772 | 130 | 258 | PEG-0264 | 137 | 253 | PEG-0294 | 143 | 256 |
| PEG-0766 | 124 | 254 | PEG-0235 | 131 | 251 | PEG-0265 | 137 | 254 | PEG-0295 | 143 | 257 |
| PEG-0767 | 124 | 256 | PEG-0236 | 131 | 252 | PEG-0266 | 137 | 255 | PEG-0296 | 143 | 258 |
| PEG-0768 | 124 | 258 | PEG-0237 | 131 | 253 | PEG-0267 | 137 | 256 | PEG-0297 | 143 | 259 |
| PEG-0208 | 125 | 251 | PEG-0238 | 131 | 254 | PEG-0268 | 137 | 257 | PEG-0745 | 144 | 252 |
| PEG-0209 | 125 | 252 | PEG-0239 | 131 | 255 | PEG-0269 | 137 | 258 | PEG-0746 | 144 | 254 |
| PEG-0210 | 125 | 253 | PEG-0240 | 131 | 256 | PEG-0270 | 137 | 259 | PEG-0747 | 144 | 256 |
| PEG-0211 | 125 | 254 | PEG-0241 | 131 | 257 | PEG-0741 | 138 | 252 | PEG-0748 | 144 | 258 |
| PEG-0212 | 125 | 255 | PEG-0242 | 131 | 258 | PEG-0742 | 138 | 254 | PEG-0298 | 145 | 251 |
| PEG-0213 | 125 | 256 | PEG-0243 | 131 | 259 | PEG-0743 | 138 | 256 | PEG-0299 | 145 | 252 |
| PEG-0214 | 125 | 257 | PEG-0737 | 132 | 252 | PEG-0744 | 138 | 258 | PEG-0300 | 145 | 253 |
| PEG-0215 | 125 | 258 | PEG-0738 | 132 | 254 | PEG-0271 | 139 | 251 | PEG-0301 | 145 | 254 |
| PEG-0216 | 125 | 259 | PEG-0739 | 132 | 256 | PEG-0272 | 139 | 252 | PEG-0302 | 145 | 255 |
| PEG-0733 | 126 | 252 | PEG-0740 | 132 | 258 | PEG-0273 | 139 | 253 | PEG-0303 | 145 | 256 |
| PEG-0734 | 126 | 254 | PEG-0244 | 133 | 251 | PEG-0274 | 139 | 254 | PEG-0304 | 145 | 257 |
| PEG-0735 | 126 | 256 | PEG-0245 | 133 | 252 | PEG-0275 | 139 | 255 | PEG-0305 | 145 | 258 |
| PEG-0736 | 126 | 258 | PEG-0246 | 133 | 253 | PEG-0276 | 139 | 256 | PEG-0306 | 145 | 259 |
| PEG-0217 | 127 | 251 | PEG-0247 | 133 | 254 | PEG-0277 | 139 | 257 | PEG-4271 | 3004 | 257 |
| PEG-0218 | 127 | 252 | PEG-0248 | 133 | 255 | PEG-0278 | 139 | 258 | PEG-4334 | 3046 | 257 |
| PEG-0219 | 127 | 253 | PEG-0249 | 133 | 256 | PEG-0279 | 139 | 259 | PEG-4398 | 3047 | 257 |
| PEG-4350 | 3035 | 252 | PEG-4302 | 3063 | 253 | PEG-4381 | 3052 | 255 | PEG-4272 | 3048 | 257 |
| PEG-4224 | 3036 | 252 | PEG-4366 | 3064 | 253 | PEG-4255 | 3053 | 255 | PEG-4222 | 3049 | 257 |
| PEG-4287 | 3038 | 252 | PEG-4240 | 3065 | 253 | PEG-4318 | 3055 | 255 | PEG-4335 | 3050 | 257 |
| PEG-4351 | 129 | 252 | PEG-4303 | 3005 | 253 | PEG-4382 | 135 | 255 | PEG-4399 | 3052 | 257 |
| PEG-4225 | 130 | 252 | PEG-4367 | 141 | 253 | PEG-4256 | 136 | 255 | PEG-4273 | 3053 | 257 |
| PEG-4288 | 132 | 252 | PEG-4241 | 142 | 253 | PEG-4319 | 138 | 255 | PEG-4336 | 3055 | 257 |
| PEG-4352 | 3043 | 252 | PEG-4304 | 144 | 253 | PEG-4383 | 3060 | 255 | PEG-4400 | 135 | 257 |
| PEG-4226 | 3004 | 252 | PEG-4368 | 3035 | 254 | PEG-4257 | 3061 | 255 | PEG-4274 | 136 | 257 |
| PEG-4289 | 3046 | 252 | PEG-4242 | 3036 | 254 | PEG-4320 | 3063 | 255 | PEG-4337 | 138 | 257 |
| PEG-4353 | 3047 | 252 | PEG-4305 | 3038 | 254 | PEG-4384 | 3064 | 255 | PEG-4401 | 3060 | 257 |
| PEG-4227 | 3048 | 252 | PEG-4369 | 129 | 254 | PEG-4258 | 3065 | 255 | PEG-4275 | 3061 | 257 |
| PEG-4217 | 3049 | 252 | PEG-4243 | 130 | 254 | PEG-4321 | 3005 | 255 | PEG-4338 | 3063 | 257 |
| PEG-4290 | 3050 | 252 | PEG-4008 | 132 | 254 | PEG-4385 | 141 | 255 | PEG-4402 | 3064 | 257 |
| PEG-4354 | 3052 | 252 | PEG-4306 | 132 | 254 | PEG-4259 | 142 | 255 | PEG-4276 | 3065 | 257 |
| PEG-4228 | 3053 | 252 | PEG-4370 | 3043 | 254 | PEG-4322 | 144 | 255 | PEG-4339 | 3005 | 257 |
| PEG-4291 | 3055 | 252 | PEG-4244 | 3004 | 254 | PEG-4386 | 3035 | 256 | PEG-4403 | 141 | 257 |
| PEG-4355 | 135 | 252 | PEG-4307 | 3046 | 254 | PEG-4260 | 3036 | 256 | PEG-4277 | 142 | 257 |
| PEG-4229 | 136 | 252 | PEG-4371 | 3047 | 254 | PEG-4323 | 3038 | 256 | PEG-4340 | 144 | 257 |
| PEG-4292 | 138 | 252 | PEG-4245 | 3048 | 254 | PEG-4387 | 129 | 256 | PEG-4404 | 3035 | 258 |
| PEG-4356 | 3060 | 252 | PEG-4219 | 3049 | 254 | PEG-4261 | 130 | 256 | PEG-4278 | 3036 | 258 |
| PEG-4230 | 3061 | 252 | PEG-4308 | 3050 | 254 | PEG-4324 | 132 | 256 | PEG-4341 | 3038 | 258 |
| PEG-4293 | 3063 | 252 | PEG-4372 | 3052 | 254 | PEG-4388 | 3043 | 256 | PEG-4405 | 129 | 258 |
| PEG-4357 | 3064 | 252 | PEG-4246 | 3053 | 254 | PEG-4262 | 3004 | 256 | PEG-4279 | 130 | 258 |
| PEG-4231 | 3065 | 252 | PEG-4309 | 3055 | 254 | PEG-4325 | 3046 | 256 | PEG-4342 | 132 | 258 |
| PEG-4294 | 3005 | 252 | PEG-4373 | 135 | 254 | PEG-4389 | 3047 | 256 | PEG-4406 | 3043 | 258 |
| PEG-4358 | 141 | 252 | PEG-4247 | 136 | 254 | PEG-4263 | 3048 | 256 | PEG-4009 | 3004 | 258 |
| PEG-4232 | 142 | 252 | PEG-4310 | 138 | 254 | PEG-4221 | 3049 | 256 | PEG-4280 | 3004 | 258 |
| PEG-4295 | 144 | 252 | PEG-4374 | 3060 | 254 | PEG-4326 | 3050 | 256 | PEG-4343 | 3046 | 258 |
| PEG-4359 | 3035 | 253 | PEG-4248 | 3061 | 254 | PEG-4390 | 3052 | 256 | PEG-4407 | 3047 | 258 |
| PEG-4233 | 3036 | 253 | PEG-4311 | 3063 | 254 | PEG-4264 | 3053 | 256 | PEG-4281 | 3048 | 258 |
| PEG-4296 | 3038 | 253 | PEG-4375 | 3064 | 254 | PEG-4327 | 3055 | 256 | PEG-4223 | 3049 | 258 |
| PEG-4360 | 129 | 253 | PEG-4249 | 3065 | 254 | PEG-4391 | 135 | 256 | PEG-4344 | 3050 | 258 |
| PEG-4234 | 130 | 253 | PEG-4312 | 3005 | 254 | PEG-4265 | 136 | 256 | PEG-4408 | 3052 | 258 |
| PEG-4007 | 132 | 253 | PEG-4376 | 141 | 254 | PEG-4328 | 138 | 256 | PEG-4282 | 3053 | 258 |
| PEG-4297 | 132 | 253 | PEG-4250 | 142 | 254 | PEG-4392 | 3060 | 256 | PEG-4345 | 3055 | 258 |
| PEG-4361 | 3043 | 253 | PEG-4010 | 144 | 254 | PEG-4266 | 3061 | 256 | PEG-4409 | 135 | 258 |
| PEG-4235 | 3004 | 253 | PEG-4313 | 144 | 254 | PEG-4329 | 3063 | 256 | PEG-4283 | 136 | 258 |
| PEG-4298 | 3046 | 253 | PEG-4377 | 3035 | 255 | PEG-4393 | 3064 | 256 | PEG-4346 | 138 | 258 |
| PEG-4362 | 3047 | 253 | PEG-4251 | 3036 | 255 | PEG-4267 | 3065 | 256 | PEG-4410 | 3060 | 258 |
| PEG-4236 | 3048 | 253 | PEG-4314 | 3038 | 255 | PEG-4330 | 3005 | 256 | PEG-4284 | 3061 | 258 |
| PEG-4218 | 3049 | 253 | PEG-4378 | 129 | 255 | PEG-4394 | 141 | 256 | PEG-4347 | 3063 | 258 |
| PEG-4299 | 3050 | 253 | PEG-4252 | 130 | 255 | PEG-4268 | 142 | 256 | PEG-4411 | 3064 | 258 |
| PEG-4363 | 3052 | 253 | PEG-4315 | 132 | 255 | PEG-4331 | 144 | 256 | PEG-4285 | 3065 | 258 |
| PEG-4237 | 3053 | 253 | PEG-4379 | 3043 | 255 | PEG-4395 | 3035 | 257 | PEG-4348 | 3005 | 258 |
| PEG-4300 | 3055 | 253 | PEG-4253 | 3004 | 255 | PEG-4269 | 3036 | 257 | PEG-4412 | 141 | 258 |
| PEG-4364 | 135 | 253 | PEG-4316 | 3046 | 255 | PEG-4332 | 3038 | 257 | PEG-4286 | 142 | 258 |
| PEG-4238 | 136 | 253 | PEG-4380 | 3047 | 255 | PEG-4396 | 129 | 257 | PEG-4349 | 144 | 258 |
| PEG-4301 | 138 | 253 | PEG-4254 | 3048 | 255 | PEG-4270 | 130 | 257 | | | |
| PEG-4365 | 3060 | 253 | PEG-4220 | 3049 | 255 | PEG-4333 | 132 | 257 | | | |
| PEG-4239 | 3061 | 253 | PEG-4317 | 3050 | 255 | PEG-4397 | 3043 | 257 | | | |

TABLE 11a
Exemplary RTT sequences for Spacer S03

| SEQ ID | | SEQ ID | |
|---|---|---|---|
| NO: | Sequence | NO: | Sequence |
| 146 | UgGUUUCUCCUCGUAUGGC | 152 | UGUAUUUgGUUUCUCCUCGUAUGGCCCCAU |
| | CCCAUU | | U |
| 147 | UUgGUUUCUCCUCGUAUGG | 153 | GCUGUAUUUgGUUUCUCCUCGUAUGGCCCC |
| | CCCCAUU | | AUU |
| 148 | UUUgGUUUCUCCUCGUAUG | 154 | AGCUGUAUUUgGUUUCUCCUCGUAUGGCCC |
| | GCCCCAUU | | CAUU |
| 149 | AUUUgGUUUCUCCUCGUAU | 155 | GAGCUGUAUUUgGUUUCUCCUCGUAUGGCC |
| | GGCCCCAUU | | CCAUU |
| 150 | UAUUUgGUUUCUCCUCGUA | 156 | GGAGCUGUAUUUgGUUUCUCCUCGUAUGGC |
| | UGGCCCCAUU | | CCCAUU |
| 151 | GUAUUUgGUUUCUCCUCGU | 157 | GGGAGCUGUAUUUgGUUUCUCCUCGUAUGG |
| | AUGGCCCCAUU | | CCCCAUU |

TABLE 11b
Exemplary PBS sequences for Spacer S03

| | Sequence |
|---|---|
| SEQ REF NO: 260 | GCCCUGU |
| SEQ REF NO: 261 | GCCCUGUU |
| SEQ REF NO: 262 | GCCCUGUUU |
| SEQ ID NO: 263 | GCCCUGUUUG |
| SEQ ID NO: 264 | GCCCUGUUUGG |
| SEQ ID NO: 265 | GCCCUGUUUGGA |
| SEQ ID NO: 266 | GCCCUGUUUGGAG |
| SEQ ID NO: 267 | GCCCUGUUUGGAGU |
| SEQ ID NO: 268 | GCCCUGUUUGGAGUC |

TABLE 11c
Exemplary RTT/PBS Combinations with Spacer S03

| PEG # | RTT | PBS |
|---|---|---|
| PEG-0307 | 146 | 260 |
| PEG-0308 | 146 | 261 |
| PEG-0309 | 146 | 262 |
| PEG-0310 | 146 | 263 |
| PEG-0311 | 146 | 264 |
| PEG-0312 | 146 | 265 |
| PEG-0313 | 146 | 266 |
| PEG-0314 | 146 | 267 |
| PEG-0315 | 146 | 268 |
| PEG-0316 | 147 | 260 |
| PEG-0317 | 147 | 261 |
| PEG-0318 | 147 | 262 |
| PEG-0319 | 147 | 263 |
| PEG-0320 | 147 | 264 |
| PEG-0321 | 147 | 265 |
| PEG-0322 | 147 | 266 |
| PEG-0323 | 147 | 267 |
| PEG-0324 | 147 | 268 |
| PEG-0325 | 148 | 260 |
| PEG-0326 | 148 | 261 |
| PEG-0327 | 148 | 262 |
| PEG-0328 | 148 | 263 |
| PEG-0329 | 148 | 264 |
| PEG-0330 | 148 | 265 |
| PEG-0331 | 148 | 266 |
| PEG-0332 | 148 | 267 |
| PEG-0333 | 148 | 268 |
| PEG-0334 | 149 | 260 |
| PEG-0335 | 149 | 261 |
| PEG-0336 | 149 | 262 |
| PEG-0337 | 149 | 263 |
| PEG-0338 | 149 | 264 |
| PEG-0339 | 149 | 265 |
| PEG-0340 | 149 | 266 |
| PEG-0341 | 149 | 267 |
| PEG-0342 | 149 | 268 |
| PEG-0343 | 150 | 260 |
| PEG-0344 | 150 | 261 |
| PEG-0345 | 150 | 262 |
| PEG-0346 | 150 | 263 |
| PEG-0347 | 150 | 264 |
| PEG-0348 | 150 | 265 |
| PEG-0349 | 150 | 266 |
| PEG-0350 | 150 | 267 |
| PEG-0351 | 150 | 268 |
| PEG-0352 | 151 | 260 |
| PEG-0353 | 151 | 261 |
| PEG-0354 | 151 | 262 |
| PEG-0355 | 151 | 263 |
| PEG-0356 | 151 | 264 |
| PEG-0357 | 151 | 265 |
| PEG-0358 | 151 | 266 |
| PEG-0359 | 151 | 267 |
| PEG-0360 | 151 | 268 |
| PEG-0361 | 152 | 260 |
| PEG-0362 | 152 | 261 |
| PEG-0363 | 152 | 262 |
| PEG-0364 | 152 | 263 |
| PEG-0365 | 152 | 264 |
| PEG-0366 | 152 | 265 |
| PEG-0367 | 152 | 266 |
| PEG-0368 | 152 | 267 |
| PEG-0369 | 152 | 268 |
| PEG-0370 | 153 | 260 |
| PEG-0371 | 153 | 261 |
| PEG-0372 | 153 | 262 |
| PEG-0373 | 153 | 263 |
| PEG-0374 | 153 | 264 |
| PEG-0375 | 153 | 265 |
| PEG-0376 | 153 | 266 |
| PEG-0377 | 153 | 267 |
| PEG-0378 | 153 | 268 |
| PEG-0379 | 154 | 260 |
| PEG-0380 | 154 | 261 |
| PEG-0381 | 154 | 262 |
| PEG-0382 | 154 | 263 |
| PEG-0383 | 154 | 264 |
| PEG-0384 | 154 | 265 |
| PEG-0385 | 154 | 266 |
| PEG-0386 | 154 | 267 |
| PEG-0387 | 154 | 268 |
| PEG-0388 | 155 | 260 |
| PEG-0389 | 155 | 261 |
| PEG-0390 | 155 | 262 |
| PEG-391 | 155 | 263 |
| PEG-0392 | 155 | 264 |
| PEG-0393 | 155 | 265 |
| PEG-0394 | 155 | 266 |
| PEG-0395 | 155 | 267 |
| PEG-0396 | 155 | 268 |
| PEG-0397 | 156 | 260 |
| PEG-0398 | 156 | 261 |
| PEG-0399 | 156 | 262 |
| PEG-0400 | 156 | 263 |
| PEG-0401 | 156 | 264 |
| PEG-0402 | 156 | 265 |
| PEG-0403 | 156 | 266 |
| PEG-0404 | 156 | 267 |
| PEG-0405 | 156 | 268 |
| PEG-0406 | 157 | 260 |
| PEG-0407 | 157 | 261 |
| PEG-0408 | 157 | 262 |
| PEG-0409 | 157 | 263 |
| PEG-0410 | 157 | 264 |
| PEG-0411 | 157 | 265 |
| PEG-0412 | 157 | 266 |
| PEG-0413 | 157 | 267 |
| PEG-0414 | 157 | 268 |

TABLE 12a
Exemplary RTT sequences for Spacer S04

| SEQ ID NO: | Sequence | SEQ ID NO: | Sequence |
|---|---|---|---|
| 158 | UgGUUUCUCCUCGUAUGGC | 164 | UGUAUUUgGUUUCUCCUCGUAUGGCC |
| | CCCAUUG | | CCAUUG |
| 159 | UUgGUUUCUCCUCGUAUGG | 165 | GCUGUAUUUgGUUUCUCCUCGUAUGG |
| | CCCCAUUG | | CCCCAUUG |
| 160 | UUUgGUUUCUCCUCGUAUG | 166 | AGCUGUAUUUgGUUUCUCCUCGUAUG |
| | GCCCCAUUG | | GCCCCAUUG |
| 161 | AUUUgGUUUCUCCUCGUAU | 167 | GAGCUGUAUUUgGUUUCUCCUCGUAU |
| | GGCCCCAUUG | | GGCCCCAUUG |
| 162 | UAUUUgGUUUCUCCUCGUA | 168 | GGAGCUGUAUUUgGUUUCUCCUCGUA |
| | UGGCCCCAUUG | | UGGCCCCAUUG |
| 163 | GUAUUUgGUUUCUCCUCGU | 3001 | GGAGCUGUAUUUgGUUUCUCCUCGUA |
| | AUGGCCCCAUUG | | UGGCCCCAUUG |

TABLE 12b
Exemplary PBS sequences for Spacer S04

| | Sequence |
|---|---|
| SEQ REF NO: 269 | CCCUGUU |
| SEQ REF NO: 270 | CCCUGUUU |
| SEQ REF NO: 271 | CCCUGUUUG |
| SEQ ID NO: 272 | CCCUGUUUGG |
| SEQ ID NO: 273 | CCCUGUUUGGA |
| SEQ ID NO: 274 | CCCUGUUUGGAG |
| SEQ ID NO: 275 | CCCUGUUUGGAGU |
| SEQ ID NO: 276 | CCCUGUUUGGAGUC |
| SEQ ID NO: 277 | CCCUGUUUGGAGUCA |

TABLE 12c
Exemplary RTT/PBS Combinations with Spacer S04

| PEG # | RTT | PBS | PEG # | RTT | PBS | PEG # | RTT | PBS | PEG # | RTT | PBS |
|---|---|---|---|---|---|---|---|---|---|---|---|
| PEG-0415 | 158 | 269 | PEG-0440 | 160 | 276 | PEG-0465 | 163 | 274 | PEG-0490 | 166 | 272 |
| PEG-0416 | 158 | 270 | PEG-0441 | 160 | 277 | PEG-0466 | 163 | 275 | PEG-0491 | 166 | 273 |
| PEG-0417 | 158 | 271 | PEG-0442 | 161 | 269 | PEG-0467 | 163 | 276 | PEG-0492 | 166 | 274 |
| PEG-0418 | 158 | 272 | PEG-0443 | 161 | 270 | PEG-0468 | 163 | 277 | PEG-0493 | 166 | 275 |
| PEG-0419 | 158 | 273 | PEG-0444 | 161 | 271 | PEG-0469 | 164 | 269 | PEG-0494 | 166 | 276 |
| PEG-0420 | 158 | 274 | PEG-0445 | 161 | 272 | PEG-0470 | 164 | 270 | PEG-0495 | 166 | 277 |
| PEG-0421 | 158 | 275 | PEG-0446 | 161 | 273 | PEG-0471 | 164 | 271 | PEG-0496 | 167 | 269 |
| PEG-0422 | 158 | 276 | PEG-0447 | 161 | 274 | PEG-0472 | 164 | 272 | PEG-0497 | 167 | 270 |
| PEG-0423 | 158 | 277 | PEG-0448 | 161 | 275 | PEG-0473 | 164 | 273 | PEG-0498 | 167 | 271 |
| PEG-0424 | 159 | 269 | PEG-0449 | 161 | 276 | PEG-0474 | 164 | 274 | PEG-0499 | 167 | 272 |
| PEG-0425 | 159 | 270 | PEG-0450 | 161 | 277 | PEG-0475 | 164 | 275 | PEG-0500 | 167 | 273 |
| PEG-0426 | 159 | 271 | PEG-0451 | 162 | 269 | PEG-0476 | 164 | 276 | PEG-0501 | 167 | 274 |
| PEG-0427 | 159 | 272 | PEG-0452 | 162 | 270 | PEG-0477 | 164 | 277 | PEG-0502 | 167 | 275 |
| PEG-0428 | 159 | 273 | PEG-0453 | 162 | 271 | PEG-0478 | 165 | 269 | PEG-0503 | 167 | 276 |
| PEG-0429 | 159 | 274 | PEG-0454 | 162 | 272 | PEG-0479 | 165 | 270 | PEG-0504 | 167 | 277 |
| PEG-0430 | 159 | 275 | PEG-0455 | 162 | 273 | PEG-0480 | 165 | 271 | PEG-0505 | 168 | 269 |
| PEG-0431 | 159 | 276 | PEG-0456 | 162 | 274 | PEG-0481 | 165 | 272 | PEG-0506 | 168 | 270 |
| PEG-0432 | 159 | 277 | PEG-0457 | 162 | 275 | PEG-0482 | 165 | 273 | PEG-0507 | 168 | 271 |
| PEG-0433 | 160 | 269 | PEG-0458 | 162 | 276 | PEG-0483 | 165 | 274 | PEG-0508 | 168 | 272 |
| PEG-0434 | 160 | 270 | PEG-0459 | 162 | 277 | PEG-0484 | 165 | 275 | PEG-0509 | 168 | 273 |
| PEG-0435 | 160 | 271 | PEG-0460 | 163 | 269 | PEG-0485 | 165 | 276 | PEG-0510 | 168 | 274 |
| PEG-0436 | 160 | 272 | PEG-0461 | 163 | 270 | PEG-0486 | 165 | 277 | PEG-0511 | 168 | 275 |
| PEG-0437 | 160 | 273 | PEG-0462 | 163 | 271 | PEG-0487 | 166 | 269 | PEG-0512 | 168 | 276 |
| PEG-0438 | 160 | 274 | PEG-0463 | 163 | 272 | PEG-0488 | 166 | 270 | PEG-0513 | 168 | 277 |
| PEG-0439 | 160 | 275 | PEG-0464 | 163 | 273 | PEG-0489 | 166 | 271 | PEG-4001 | 3001 | 270 |
| PEG-4002 | 3001 | 272 | PEG-4003 | 3001 | 274 | PEG-4004 | 3001 | 276 | | | |

TABLE 13a
Exemplary RTT sequences for Spacer S05

| SEQ ID NO: | Sequence | SEQ ID NO: | Sequence |
|---|---|---|---|
| 169 | UgGUUUCUCCUCGUAUGGC | 172 | AUUUgGUUUCUCCUCGUAUGGCCCCAU |
| | CCCAUUGCCCUGU | | UGCCCUGU |
| 170 | UUgGUUUCUCCUCGUAUGG | 173 | UAUUUgGUUUCUCCUCGUAUGGCCCCA |
| | CCCCAUUGCCCUGU | | UUGCCCUGU |
| 171 | UUUgGUUUCUCCUCGUAUG | 174 | GUAUUUgGUUUCUCCUCGUAUGGCCCC |
| | GCCCCAUUGCCCUGU | | AUUGCCCUGU |

TABLE 13b
Exemplary PBS sequences for Spacer S05

| | Sequence |
|---|---|
| SEQ REF NO: 278 | UUGGAGU |
| SEQ REF NO: 279 | UUGGAGUC |
| SEQ REF NO: 280 | UUGGAGUCA |
| SEQ ID NO: 281 | UUGGAGUCAU |
| SEQ ID NO: 282 | UUGGAGUCAUA |
| SEQ ID NO: 283 | UUGGAGUCAUAG |
| SEQ ID NO: 284 | UUGGAGUCAUAGC |
| SEQ ID NO: 285 | UUGGAGUCAUAGCC |
| SEQ ID NO: 286 | UUGGAGUCAUAGCCA |

TABLE 13c
Exemplary RTT/PBS Combinations with Spacer S05

| PEG # | RTT | PBS |
|---|---|---|
| PEG-0514 | 169 | 278 |
| PEG-0515 | 169 | 279 |
| PEG-0516 | 169 | 280 |
| PEG-0517 | 169 | 281 |
| PEG-0518 | 169 | 282 |
| PEG-0519 | 169 | 283 |
| PEG-0520 | 169 | 284 |
| PEG-0521 | 169 | 285 |
| PEG-0522 | 169 | 286 |
| PEG-0523 | 170 | 278 |
| PEG-0524 | 170 | 279 |
| PEG-0525 | 170 | 280 |
| PEG-0526 | 170 | 281 |
| PEG-0527 | 170 | 282 |
| PEG-0528 | 170 | 283 |
| PEG-0529 | 170 | 284 |
| PEG-0530 | 170 | 285 |
| PEG-0531 | 170 | 286 |
| PEG-0532 | 171 | 278 |
| PEG-0533 | 171 | 279 |
| PEG-0534 | 171 | 280 |
| PEG-0535 | 171 | 281 |
| PEG-0536 | 171 | 282 |
| PEG-0537 | 171 | 283 |
| PEG-0538 | 171 | 284 |
| PEG-0539 | 171 | 285 |
| PEG-0540 | 171 | 286 |
| PEG-0541 | 172 | 278 |
| PEG-0542 | 172 | 279 |
| PEG-0543 | 172 | 280 |
| PEG-0544 | 172 | 281 |
| PEG-0545 | 172 | 282 |
| PEG-0546 | 172 | 283 |
| PEG-0547 | 172 | 284 |
| PEG-0548 | 172 | 285 |
| PEG-0549 | 172 | 286 |
| PEG-0550 | 173 | 278 |
| PEG-0551 | 173 | 279 |
| PEG-0552 | 173 | 280 |
| PEG-0553 | 173 | 281 |
| PEG-0554 | 173 | 282 |
| PEG-0555 | 173 | 283 |
| PEG-0556 | 173 | 284 |
| PEG-0557 | 173 | 285 |
| PEG-0558 | 173 | 286 |
| PEG-0559 | 174 | 278 |
| PEG-0560 | 174 | 279 |
| PEG-0561 | 174 | 280 |
| PEG-0562 | 174 | 281 |
| PEG-0563 | 174 | 282 |
| PEG-0564 | 174 | 283 |
| PEG-0565 | 174 | 284 |
| PEG-0566 | 174 | 285 |
| PEG-0567 | 174 | 286 |

TABLE 14a
Exemplary RTT sequences for Spacer S06

| SEQ ID | | SEQ ID | |
|---|---|---|---|
| NO: | Sequence | NO: | Sequence |
| 175 | UgGUUUCUCCUCGUAUGGCCCC | 178 | AUUUgGUUUCUCCUCGUAUGGCCCCAU |
| | AUUGCCCUGUU | | UGCCCUGUU |
| 176 | UUgGUUUCUCCUCGUAUGGCCC | 179 | UAUUUgGUUUCUCCUCGUAUGGCCCCA |
| | CAUUGCCCUGUU | | UUGCCCUGUU |
| 177 | UUUgGUUUCUCCUCGUAUGGCC | | |
| | CCAUUGCCCUGUU | | |

TABLE 14b
Exemplary PBS sequences for Spacer S06

| | Sequence |
|---|---|
| SEQ REF NO: 287 | UGGAGUC |
| SEQ REF NO: 288 | UGGAGUCA |
| SEQ REF NO: 289 | UGGAGUCAU |
| SEQ ID NO: 290 | UGGAGUCAUA |
| SEQ ID NO: 291 | UGGAGUCAUAG |
| SEQ ID NO: 292 | UGGAGUCAUAGC |
| SEQ ID NO: 293 | UGGAGUCAUAGCC |
| SEQ ID NO: 294 | UGGAGUCAUAGCCA |
| SEQ ID NO: 295 | UGGAGUCAUAGCCAA |

TABLE 14c
Exemplary RTT/PBS Combinations with Spacer S06

| PEG # | RTT | PBS |
|---|---|---|
| PEG-0568 | 175 | 287 |
| PEG-0569 | 175 | 288 |
| PEG-0570 | 175 | 289 |
| PEG-0571 | 175 | 290 |
| PEG-0572 | 175 | 291 |
| PEG-0573 | 175 | 292 |
| PEG-0574 | 175 | 293 |
| PEG-0575 | 175 | 294 |
| PEG-0576 | 175 | 295 |
| PEG-0577 | 176 | 287 |
| PEG-0578 | 176 | 288 |
| PEG-0579 | 176 | 289 |
| PEG-0580 | 176 | 290 |
| PEG-0581 | 176 | 291 |
| PEG-0582 | 176 | 292 |
| PEG-0583 | 176 | 293 |
| PEG-0584 | 176 | 294 |
| PEG-0585 | 176 | 295 |
| PEG-0586 | 177 | 287 |
| PEG-0587 | 177 | 288 |
| PEG-0588 | 177 | 289 |
| PEG-0589 | 177 | 290 |
| PEG-0590 | 177 | 291 |
| PEG-0591 | 177 | 292 |
| PEG-0592 | 177 | 293 |
| PEG-0593 | 177 | 294 |
| PEG-0594 | 177 | 295 |
| PEG-0595 | 178 | 287 |
| PEG-0596 | 178 | 288 |
| PEG-0597 | 178 | 289 |
| PEG-0598 | 178 | 290 |
| PEG-0599 | 178 | 291 |
| PEG-0600 | 178 | 292 |
| PEG-0601 | 178 | 293 |
| PEG-0602 | 178 | 294 |
| PEG-0603 | 178 | 295 |
| PEG-0604 | 179 | 287 |
| PEG-0605 | 179 | 288 |
| PEG-0606 | 179 | 289 |
| PEG-0607 | 179 | 290 |
| PEG-0608 | 179 | 291 |
| PEG-0609 | 179 | 292 |
| PEG-0610 | 179 | 293 |
| PEG-0611 | 179 | 294 |
| PEG-0612 | 179 | 295 |

TABLE 15a
Exemplary RTT sequences for Spacer S07

| SEQ ID | | SEQ ID | |
|---|---|---|---|
| NO: | Sequence | NO: | Sequence |
| 180 | ACCAAAUACAGCUCCCAAU | 188 | GAGGAGAAACCAAAUACAGCUCCCA |
| | | | AU |
| 181 | AACCAAAUACAGCUCCCAAU | 189 | ACGAGGAGAAACCAAAUACAGCUCC |
| | | | CAAU |
| 182 | AAACCAAAUACAGCUCCCAA | 190 | UACGAGGAGAAACCAAAUACAGCUC |
| | U | | CCAAU |
| 183 | GAAACCAAAUACAGCUCCCA | 191 | AUACGAGGAGAAACCAAAUACAGCU |
| | AU | | CCCAAU |
| 184 | AGAAACCAAAUACAGCUCCC | 192 | GCCAUACGAGGAGAAACCAAAUACA |
| | AAU | | GCUCCCAAU |
| 185 | GAGAAACCAAAUACAGCUCC | 193 | GGCCAUACGAGGAGAAACCAAAUAC |
| | CAAU | | AGCUCCCAAU |
| 186 | GGAGAAACCAAAUACAGCUC | 194 | GGGCCAUACGAGGAGAAACCAAAUA |
| | CCAAU | | CAGCUCCCAAU |
| 187 | AGGAGAAACCAAAUACAGCU | | |
| | CCCAAU | | |

TABLE 15b
Exemplary PBS sequences for Spacer S07

| | Sequence |
|---|---|
| SEQ REF NO: 296 | ACCAGGA |
| SEQ REF NO: 297 | ACCAGGAU |
| SEQ REF NO: 298 | ACCAGGAUC |
| SEQ ID NO: 299 | ACCAGGAUCC |
| SEQ ID NO: 300 | ACCAGGAUCCA |
| SEQ ID NO: 301 | ACCAGGAUCCAG |
| SEQ ID NO: 302 | ACCAGGAUCCAGA |
| SEQ ID NO: 303 | ACCAGGAUCCAGAG |
| SEQ ID NO: 304 | ACCAGGAUCCAGAGC |

TABLE 15c
Exemplary RTT/PBS Combinations with Spacer S07

| PEG # | RTT | PBS |
|---|---|---|
| PEG-0781 | 180 | 296 |
| PEG-0782 | 180 | 297 |
| PEG-0783 | 180 | 298 |
| PEG-0784 | 180 | 299 |
| PEG-0785 | 180 | 300 |
| PEG-0786 | 180 | 301 |
| PEG-0787 | 180 | 302 |
| PEG-0788 | 180 | 303 |
| PEG-0789 | 180 | 304 |
| PEG-0790 | 181 | 296 |
| PEG-0791 | 181 | 297 |
| PEG-0792 | 181 | 298 |
| PEG-0793 | 181 | 299 |
| PEG-0794 | 181 | 300 |
| PEG-0795 | 181 | 301 |
| PEG-0796 | 181 | 302 |
| PEG-0797 | 181 | 303 |
| PEG-0798 | 181 | 304 |
| PEG-0799 | 182 | 296 |
| PEG-0800 | 182 | 297 |
| PEG-0801 | 182 | 298 |
| PEG-0802 | 182 | 299 |
| PEG-0803 | 182 | 300 |
| PEG-0804 | 182 | 301 |
| PEG-0805 | 182 | 302 |
| PEG-0806 | 182 | 303 |
| PEG-0807 | 182 | 304 |
| PEG-0808 | 183 | 296 |
| PEG-0809 | 183 | 297 |
| PEG-0810 | 183 | 298 |
| PEG-0811 | 183 | 299 |
| PEG-0812 | 183 | 300 |
| PEG-0813 | 183 | 301 |
| PEG-0814 | 183 | 302 |
| PEG-0815 | 183 | 303 |
| PEG-0816 | 183 | 304 |
| PEG-0817 | 184 | 296 |
| PEG-0818 | 184 | 297 |
| PEG-0819 | 184 | 298 |
| PEG-0820 | 184 | 299 |
| PEG-0821 | 184 | 300 |
| PEG-0822 | 184 | 301 |
| PEG-0823 | 184 | 302 |
| PEG-0824 | 184 | 303 |
| PEG-0825 | 184 | 304 |
| PEG-0826 | 185 | 296 |
| PEG-0827 | 185 | 297 |
| PEG-0828 | 185 | 298 |
| PEG-0829 | 185 | 299 |
| PEG-0830 | 185 | 300 |
| PEG-0831 | 185 | 301 |
| PEG-0832 | 185 | 302 |
| PEG-0833 | 185 | 303 |
| PEG-0834 | 185 | 304 |
| PEG-0835 | 186 | 296 |
| PEG-0836 | 186 | 297 |
| PEG-0837 | 186 | 298 |
| PEG-0838 | 186 | 299 |
| PEG-0839 | 186 | 300 |
| PEG-0840 | 186 | 301 |
| PEG-0841 | 186 | 302 |
| PEG-0842 | 186 | 303 |
| PEG-0843 | 186 | 304 |
| PEG-0844 | 187 | 296 |
| PEG-0845 | 187 | 297 |
| PEG-0846 | 187 | 298 |
| PEG-0847 | 187 | 299 |
| PEG-0848 | 187 | 300 |
| PEG-0849 | 187 | 301 |
| PEG-0850 | 187 | 302 |
| PEG-0851 | 187 | 303 |
| PEG-0852 | 187 | 304 |
| PEG-0853 | 188 | 296 |
| PEG-0854 | 188 | 297 |
| PEG-0855 | 188 | 298 |
| PEG-0856 | 188 | 299 |
| PEG-0857 | 188 | 300 |
| PEG-0858 | 188 | 301 |
| PEG-0859 | 188 | 302 |
| PEG-0860 | 188 | 303 |
| PEG-0861 | 188 | 304 |
| PEG-0862 | 189 | 296 |
| PEG-0863 | 189 | 297 |
| PEG-0864 | 189 | 298 |
| PEG-0865 | 189 | 299 |
| PEG-0866 | 189 | 300 |
| PEG-0867 | 189 | 301 |
| PEG-0868 | 189 | 302 |
| PEG-0869 | 189 | 303 |
| PEG-0870 | 189 | 304 |
| PEG-0871 | 190 | 296 |
| PEG-0872 | 190 | 297 |
| PEG-0873 | 190 | 298 |
| PEG-0874 | 190 | 299 |
| PEG-0875 | 190 | 300 |
| PEG-0876 | 190 | 301 |
| PEG-0877 | 190 | 302 |
| PEG-0878 | 190 | 303 |
| PEG-0879 | 190 | 304 |
| PEG-0880 | 191 | 296 |
| PEG-0881 | 191 | 297 |
| PEG-0882 | 191 | 298 |
| PEG-0883 | 191 | 299 |
| PEG-0884 | 191 | 300 |
| PEG-0885 | 191 | 301 |
| PEG-0886 | 191 | 302 |
| PEG-0887 | 191 | 303 |
| PEG-0888 | 191 | 304 |
| PEG-0889 | 192 | 296 |
| PEG-0890 | 192 | 297 |
| PEG-0891 | 192 | 298 |
| PEG-0892 | 192 | 299 |
| PEG-0893 | 192 | 300 |
| PEG-0894 | 192 | 301 |
| PEG-0895 | 192 | 302 |
| PEG-0896 | 192 | 303 |
| PEG-0897 | 192 | 304 |
| PEG-0898 | 193 | 296 |
| PEG-0899 | 193 | 297 |
| PEG-0900 | 193 | 298 |
| PEG-0901 | 193 | 299 |
| PEG-0902 | 193 | 300 |
| PEG-0903 | 193 | 301 |
| PEG-0904 | 193 | 302 |
| PEG-0905 | 193 | 303 |
| PEG-0906 | 193 | 304 |
| PEG-0907 | 194 | 296 |
| PEG-0908 | 194 | 297 |
| PEG-0909 | 194 | 298 |
| PEG-0910 | 194 | 299 |
| PEG-0911 | 194 | 300 |
| PEG-0912 | 194 | 301 |
| PEG-0913 | 194 | 302 |
| PEG-0914 | 194 | 303 |
| PEG-0915 | 194 | 304 |
| PEG-0916 | 195 | 296 |
| PEG-0917 | 195 | 297 |
| PEG-0918 | 195 | 298 |
| PEG-0919 | 195 | 299 |
| PEG-0920 | 195 | 300 |
| PEG-0921 | 195 | 301 |
| PEG-0922 | 195 | 302 |
| PEG-0923 | 195 | 303 |
| PEG-0924 | 195 | 304 |

TABLE 16a
Exemplary RTT sequences for Spacer S08

| SEQ ID | | SEQ ID | |
|---|---|---|---|
| NO: | Sequence | NO: | Sequence |
| 196 | ACCAAAUACAGCU | 211 | GGAGAAACCAAAUACAGCUCCa |
| | CCCAAUA | | AAUA |
| 197 | AACCAAAUACAGC | 212 | AGGAGAAACCAAAUACAGCUCC |
| | UCCCAAUA | | CAAUA |
| 198 | AAACCAAAUACAG | 213 | GAGGAGAAACCAAAUACAGCUC |
| | CUCCCAAUA | | CCAAUA |
| 199 | AAACCAAAUACAG | 214 | GAGGAGAAACCAAAUACAGCUC |
| | CUCCuAAUA | | CuAAUA |
| 200 | AAACCAAAUACAG | 215 | GAGGAGAAACCAAAUACAGCUC |
| | CUCCgAAUA | | CgAAUA |
| 201 | AAACCAAAUACAG | 216 | GAGGAGAAACCAAAUACAGCUC |
| | CUCCaAAUA | | CaAAUA |
| 202 | GAAACCAAAUACA | 217 | ACGAGGAGAAACCAAAUACAGC |
| | GCUCCCAAUA | | UCCCAAUA |
| 203 | AGAAACCAAAUAC | 219 | UACGAGGAGAAACcAAAUACAG |
| | AGCUCCCAAUA | | CUCCuAAUA |
| 204 | AGAAACCAAAUAC | 220 | UACGAGGAGAAACCAAAUACAG |
| | AGCUCCuAAUA | | CUCCgAAUA |
| 205 | AGAAACCAAAUAC | 221 | UACGAGGAGAAACCAAAUACAG |
| | AGCUCCgAAUA | | CUCCaAAUA |
| 206 | AGAAACCAAAUAC | 222 | AUACGAGGAGAAACCAAAUACA |
| | AGCUCCaAAUA | | GCUCCCAAUA |
| 207 | GAGAAACCAAAUA | 223 | GCCAUACGAGGAGAAACCAAAU |
| | CAGCUCCCAAUA | | ACAGCUCCCAAUA |
| 208 | GGAGAAACCAAAU | 224 | GGCCAUACGAGGAGAAACCAAA |
| | ACAGCUCCCAAUA | | UACAGCUCCCAAUA |
| 209 | GGAGAAACCAAAU | 225 | GGGCCAUACGAGGAGAAACCAA |
| | ACAGCUCCuAAUA | | AUACAGCUCCCAAUA |
| 210 | GGAGAAACCAAAU | 3007 | GAGAAACCAAAUACAGCUCCG |
| | ACAGCUCCgAAUA | | AGUA |
| 6086 | GAAACCAAAUACA | 3008 | GAGAAACCAAAUACAGCUCCA |
| | GCUCCUAAUA | | AGUA |
| 3002 | GAAACCAAAUACA | 3009 | AGGAGAAACCAAAUACAGCUC |
| | GCUCCGAGUA | | CUAAUA |
| 6087 | GAAACCAAAUACA | 3010 | AGGAGAAACCAAAUACAGCUC |
| | GCUCCGAGUA | | CGAGUA |
| 6088 | GAAACCAAAUACA | 3011 | AGGAGAAACCAAAUACAGCUC |
| | GCUCCCAAUA | | CAAGUA |
| 6089 | GAAACCAAAUACA | 3007 | GAGAAACCAAAUACAGCUCCG |
| | GCUCCAAGUA | | AGUA |
| 3006 | GAGAAACCAAAUA | | |
| | CAGCUCCUAAUA | | |

TABLE 16b
Exemplary PBS sequences for Spacer S08

| | Sequence |
|---|---|
| SEQ REF NO: 305 | CCAGGAU |
| SEQ REF NO: 306 | CCAGGAUC |
| SEQ REF NO: 307 | CCAGGAUCC |
| SEQ ID NO: 308 | CCAGGAUCCA |
| SEQ ID NO: 309 | CCAGGAUCCAG |
| SEQ ID NO: 310 | CCAGGAUCCAGA |
| SEQ ID NO: 311 | CCAGGAUCCAGAG |
| SEQ ID NO: 312 | CCAGGAUCCAGAGC |
| SEQ ID NO: 313 | CCAGGAUCCAGAGCU |

TABLE 16c
Exemplary RTT/PBS Combinations with Spacer S08

| PEG # | RTT | PBS | PEG # | RTT | PBS | PEG # | RTT | PBS | PEG # | RTT | PBS |
|---|---|---|---|---|---|---|---|---|---|---|---|
| PEG-0925 | 196 | 305 | PEG-0962 | 203 | 306 | PEG-1255 | 211 | 312 | PEG-1240 | 219 | 306 |
| PEG-0926 | 196 | 306 | PEG-0963 | 203 | 307 | PEG-0988 | 212 | 305 | PEG-1241 | 219 | 308 |
| PEG-0927 | 196 | 307 | PEG-0964 | 203 | 308 | PEG-0989 | 212 | 306 | PEG-1242 | 219 | 310 |
| PEG-0928 | 196 | 308 | PEG-0965 | 203 | 309 | PEG-0990 | 212 | 307 | PEG-1243 | 219 | 312 |
| PEG-0929 | 196 | 309 | PEG-0966 | 203 | 310 | PEG-0991 | 212 | 308 | PEG-1220 | 220 | 306 |
| PEG-0930 | 196 | 310 | PEG-0967 | 203 | 311 | PEG-0992 | 212 | 309 | PEG-1221 | 220 | 308 |
| PEG-0931 | 196 | 311 | PEG-0968 | 203 | 312 | PEG-0993 | 212 | 310 | PEG-1222 | 220 | 310 |
| PEG-0932 | 196 | 312 | PEG-0969 | 203 | 313 | PEG-0994 | 212 | 311 | PEG-1223 | 220 | 312 |
| PEG-0933 | 196 | 313 | PEG-1228 | 204 | 306 | PEG-0995 | 212 | 312 | PEG-1260 | 221 | 306 |
| PEG-0934 | 197 | 305 | PEG-1229 | 204 | 308 | PEG-0996 | 212 | 313 | PEG-1261 | 221 | 308 |
| PEG-0935 | 197 | 306 | PEG-1230 | 204 | 310 | PEG-0997 | 213 | 305 | PEG-1262 | 221 | 310 |
| PEG-0936 | 197 | 307 | PEG-1231 | 204 | 312 | PEG-0998 | 213 | 306 | PEG-1263 | 221 | 312 |
| PEG-0937 | 197 | 308 | PEG-1208 | 205 | 306 | PEG-0999 | 213 | 307 | PEG-1024 | 222 | 305 |
| PEG-0938 | 197 | 309 | PEG-1209 | 205 | 308 | PEG-1000 | 213 | 308 | PEG-1025 | 222 | 306 |
| PEG-0939 | 197 | 310 | PEG-1210 | 205 | 310 | PEG-1001 | 213 | 309 | PEG-1026 | 222 | 307 |
| PEG-0940 | 197 | 311 | PEG-1211 | 205 | 312 | PEG-1002 | 213 | 310 | PEG-1027 | 222 | 308 |
| PEG-0941 | 197 | 312 | PEG-1248 | 206 | 306 | PEG-1003 | 213 | 311 | PEG-1028 | 222 | 309 |
| PEG-0942 | 197 | 313 | PEG-1249 | 206 | 308 | PEG-1004 | 213 | 312 | PEG-1029 | 222 | 310 |
| PEG-0943 | 198 | 305 | PEG-1250 | 206 | 310 | PEG-1005 | 213 | 313 | PEG-1030 | 222 | 311 |
| PEG-0944 | 198 | 306 | PEG-1251 | 206 | 312 | PEG-1236 | 214 | 306 | PEG-1031 | 222 | 312 |
| PEG-0945 | 198 | 307 | PEG-0970 | 207 | 305 | PEG-1237 | 214 | 308 | PEG-1032 | 222 | 313 |
| PEG-0946 | 198 | 308 | PEG-0971 | 207 | 306 | PEG-1238 | 214 | 310 | PEG-1033 | 223 | 305 |
| PEG-0947 | 198 | 309 | PEG-0972 | 207 | 307 | PEG-1239 | 214 | 312 | PEG-1034 | 223 | 306 |
| PEG-0948 | 198 | 310 | PEG-0973 | 207 | 308 | PEG-1216 | 215 | 306 | PEG-1035 | 223 | 307 |
| PEG-0949 | 198 | 311 | PEG-0974 | 207 | 309 | PEG-1217 | 215 | 308 | PEG-1036 | 223 | 308 |
| PEG-0950 | 198 | 312 | PEG-0975 | 207 | 310 | PEG-1218 | 215 | 310 | PEG-1037 | 223 | 309 |
| PEG-0951 | 198 | 313 | PEG-0976 | 207 | 311 | PEG-1219 | 215 | 312 | PEG-1038 | 223 | 310 |
| PEG-1224 | 199 | 306 | PEG-0977 | 207 | 312 | PEG-1256 | 216 | 306 | PEG-1039 | 223 | 311 |
| PEG-1225 | 199 | 308 | PEG-0978 | 207 | 313 | PEG-1257 | 216 | 308 | PEG-1040 | 223 | 312 |
| PEG-1226 | 199 | 310 | PEG-0979 | 208 | 305 | PEG-1258 | 216 | 310 | PEG-1041 | 223 | 313 |
| PEG-1227 | 199 | 312 | PEG-0980 | 208 | 306 | PEG-1259 | 216 | 312 | PEG-1042 | 224 | 305 |
| PEG-1204 | 200 | 306 | PEG-0981 | 208 | 307 | PEG-1006 | 217 | 305 | PEG-1043 | 224 | 306 |
| PEG-1205 | 200 | 308 | PEG-0982 | 208 | 308 | PEG-1007 | 217 | 306 | PEG-1044 | 224 | 307 |
| PEG-1206 | 200 | 310 | PEG-0983 | 208 | 309 | PEG-1008 | 217 | 307 | PEG-1045 | 224 | 308 |
| PEG-1207 | 200 | 312 | PEG-0984 | 208 | 310 | PEG-1009 | 217 | 308 | PEG-1046 | 224 | 309 |
| PEG-1244 | 201 | 306 | PEG-0985 | 208 | 311 | PEG-1010 | 217 | 309 | PEG-1047 | 224 | 310 |
| PEG-1245 | 201 | 308 | PEG-0986 | 208 | 312 | PEG-1011 | 217 | 310 | PEG-1048 | 224 | 311 |
| PEG-1246 | 201 | 310 | PEG-0987 | 208 | 313 | PEG-1012 | 217 | 311 | PEG-1049 | 224 | 312 |
| PEG-1247 | 201 | 312 | PEG-1232 | 209 | 306 | PEG-1013 | 217 | 312 | PEG-1050 | 224 | 313 |
| PEG-0952 | 202 | 305 | PEG-1233 | 209 | 308 | PEG-1014 | 217 | 313 | PEG-1051 | 225 | 305 |
| PEG-0953 | 202 | 306 | PEG-1234 | 209 | 310 | PEG-1015 | 218 | 305 | PEG-1052 | 225 | 306 |
| PEG-0954 | 202 | 307 | PEG-1235 | 209 | 312 | PEG-1016 | 218 | 306 | PEG-1053 | 225 | 307 |
| PEG-0955 | 202 | 308 | PEG-1212 | 210 | 306 | PEG-1017 | 218 | 307 | PEG-1054 | 225 | 308 |
| PEG-0956 | 202 | 309 | PEG-1213 | 210 | 308 | PEG-1018 | 218 | 308 | PEG-1055 | 225 | 309 |
| PEG-0957 | 202 | 310 | PEG-1214 | 210 | 310 | PEG-1019 | 218 | 309 | PEG-1056 | 225 | 310 |
| PEG-0958 | 202 | 311 | PEG-1215 | 210 | 312 | PEG-1020 | 218 | 310 | PEG-1057 | 225 | 311 |
| PEG-0959 | 202 | 312 | PEG-1252 | 211 | 306 | PEG-1021 | 218 | 311 | PEG-1058 | 225 | 312 |
| PEG-0960 | 202 | 313 | PEG-1253 | 211 | 308 | PEG-1022 | 218 | 312 | PEG-1059 | 225 | 313 |
| PEG-0961 | 203 | 305 | PEG-1254 | 211 | 310 | PEG-1023 | 218 | 313 | PEG-4038 | 204 | 311 |
| PEG-4013 | 3001 | 306 | PEG-4087 | 3010 | 307 | PEG-4062 | 3008 | 309 | PEG-4103 | 205 | 311 |
| PEG-4079 | 3002 | 306 | PEG-4054 | 3011 | 307 | PEG-4030 | 209 | 309 | PEG-4071 | 206 | 311 |
| PEG-4046 | 3005 | 306 | PEG-4022 | 214 | 307 | PEG-4095 | 210 | 309 | PEG-4039 | 3006 | 311 |
| PEG-4014 | 3006 | 306 | PEG-4088 | 215 | 307 | PEG-4063 | 211 | 309 | PEG-4104 | 3007 | 311 |
| PEG-4080 | 3007 | 306 | PEG-4055 | 216 | 307 | PEG-4031 | 3009 | 309 | PEG-4072 | 3008 | 311 |
| PEG-4047 | 3008 | 306 | PEG-4023 | 300 | 308 | PEG-4096 | 3010 | 309 | PEG-4040 | 209 | 311 |
| PEG-4015 | 3009 | 306 | PEG-4089 | 3002 | 308 | PEG-4064 | 3011 | 309 | PEG-4105 | 210 | 311 |
| PEG-4081 | 3010 | 306 | PEG-4056 | 3005 | 308 | PEG-4032 | 214 | 309 | PEG-4073 | 211 | 311 |
| PEG-4048 | 3011 | 306 | PEG-4024 | 3006 | 308 | PEG-4097 | 215 | 309 | PEG-4041 | 3009 | 311 |
| PEG-4016 | 199 | 307 | PEG-4090 | 3007 | 308 | PEG-4065 | 216 | 309 | PEG-4106 | 3010 | 311 |
| PEG-4082 | 200 | 307 | PEG-4057 | 3008 | 308 | PEG-4033 | 3001 | 310 | PEG-4074 | 3011 | 311 |
| PEG-4049 | 201 | 307 | PEG-4025 | 3009 | 308 | PEG-4098 | 3002 | 310 | PEG-4042 | 214 | 311 |
| PEG-4017 | 3001 | 307 | PEG-4091 | 3010 | 308 | PEG-4066 | 3005 | 310 | PEG-4107 | 215 | 311 |
| PEG-4083 | 3002 | 307 | PEG-4058 | 3011 | 308 | PEG-4034 | 3006 | 310 | PEG-4075 | 216 | 311 |
| PEG-4050 | 3005 | 307 | PEG-4026 | 199 | 309 | PEG-4099 | 3007 | 310 | PEG-4043 | 3001 | 312 |
| PEG-4018 | 204 | 307 | PEG-4092 | 200 | 309 | PEG-4067 | 3008 | 310 | PEG-4012 | 3002 | 312 |
| PEG-4084 | 205 | 307 | PEG-4059 | 201 | 309 | PEG-4035 | 3009 | 310 | PEG-4076 | 3005 | 312 |
| PEG-4051 | 206 | 307 | PEG-4027 | 3001 | 309 | PEG-4100 | 3010 | 310 | PEG-4044 | 3006 | 312 |
| PEG-4019 | 3006 | 307 | PEG-4011 | 3002 | 309 | PEG-4068 | 3011 | 310 | PEG-4108 | 3007 | 312 |
| PEG-4085 | 3007 | 307 | PEG-4060 | 3005 | 309 | PEG-4036 | 199 | 311 | PEG-4077 | 3008 | 312 |
| PEG-4052 | 3008 | 307 | PEG-4028 | 204 | 309 | PEG-4101 | 200 | 311 | PEG-4045 | 3009 | 312 |
| PEG-4020 | 209 | 307 | PEG-4093 | 205 | 309 | PEG-4069 | 201 | 311 | PEG-4109 | 3010 | 312 |
| PEG-4086 | 210 | 307 | PEG-4061 | 206 | 309 | PEG-4037 | 3001 | 311 | PEG-4078 | 3011 | 312 |
| PEG-4053 | 211 | 307 | PEG-4029 | 3006 | 309 | PEG-4102 | 3002 | 311 | | | |
| PEG-4021 | 3009 | 307 | PEG-4094 | 3007 | 309 | PEG-4070 | 3005 | 311 | | | |

TABLE 17a
Exemplary RTT sequences for Spacer S09

| SEQ | | SEQ ID | |
|---|---|---|---|
| ID NO: | Sequence | NO: | Sequence |
| 226 | ACCAAAUACAGCUCCCAAUACCAG | 232 | GGAGAAACcAAAUACAGCUCCCAAUA |
| | GA | | CCAGGA |
| 227 | AACCAAAUACAGCUCCCAAUACCAG | 233 | AGGAGAAACCAAAUACAGCUCCCAAU |
| | GA | | ACCAGGA |
| 228 | AAACcAAAUACAGCUCCCAAUACCA | 234 | GAGGAGAAACCAAAUACAGCUCCCAA |
| | GGA | | UACCAGGA |
| 229 | GAAACcAAAUACAGCUCCCAAUACC | 235 | ACGAGGAGAAACCAAAUACAGCUCCC |
| | AGGA | | AAUACCAGGA |
| 230 | AGAAACcAAAUACAGCUCCCAAUAC | 236 | UACGAGGAGAAACCAAAUACAGCUCC |
| | CAGGA | | CAAUACCAGGA |
| 231 | GAGAAACcAAAUACAGCUCCCAAUA | | |
| | CCAGGA | | |

TABLE 17b
Exemplary PBS sequences for Spacer S09

| | Sequence |
|---|---|
| SEQ REF NO: 314 | UCCAGAG |
| SEQ REF NO: 315 | UCCAGAGC |
| SEQ REF NO: 316 | UCCAGAGCU |
| SEQ ID NO: 317 | UCCAGAGCUG |
| SEQ ID NO: 318 | UCCAGAGCUGC |
| SEQ ID NO: 319 | UCCAGAGCUGCC |
| SEQ ID NO: 320 | UCCAGAGCUGCCA |
| SEQ ID NO: 321 | UCCAGAGCUGCCAA |
| SEQ ID NO: 322 | UCCAGAGCUGCCAAG |

TABLE 17c
Exemplary RTT/PBS Combinations with Spacer S09

| PEG # | RTT | PBS |
|---|---|---|
| PEG-1060 | 226 | 314 |
| PEG-1061 | 226 | 315 |
| PEG-1062 | 226 | 316 |
| PEG-1063 | 226 | 317 |
| PEG-1064 | 226 | 318 |
| PEG-1065 | 226 | 319 |
| PEG-1066 | 226 | 320 |
| PEG-1067 | 226 | 321 |
| PEG-1068 | 226 | 322 |
| PEG-1069 | 227 | 314 |
| PEG-1070 | 227 | 315 |
| PEG-1071 | 227 | 316 |
| PEG-1072 | 227 | 317 |
| PEG-1073 | 227 | 318 |
| PEG-1074 | 227 | 319 |
| PEG-1075 | 227 | 320 |
| PEG-1076 | 227 | 321 |
| PEG-1077 | 227 | 322 |
| PEG-1078 | 228 | 314 |
| PEG-1079 | 228 | 315 |
| PEG-1080 | 228 | 316 |
| PEG-1081 | 228 | 317 |
| PEG-1082 | 228 | 318 |
| PEG-1083 | 228 | 319 |
| PEG-1084 | 228 | 320 |
| PEG-1085 | 228 | 321 |
| PEG-1086 | 228 | 322 |
| PEG-1087 | 229 | 314 |
| PEG-1088 | 229 | 315 |
| PEG-1089 | 229 | 316 |
| PEG-1090 | 229 | 317 |
| PEG-1091 | 229 | 318 |
| PEG-1092 | 229 | 319 |
| PEG-1093 | 229 | 320 |
| PEG-1094 | 229 | 321 |
| PEG-1095 | 229 | 322 |
| PEG-1096 | 230 | 314 |
| PEG-1097 | 230 | 315 |
| PEG-1098 | 230 | 316 |
| PEG-1099 | 230 | 317 |
| PEG-1100 | 230 | 318 |
| PEG-1101 | 230 | 319 |
| PEG-1102 | 230 | 320 |
| PEG-1103 | 230 | 321 |
| PEG-1104 | 230 | 322 |
| PEG-1105 | 231 | 314 |
| PEG-1106 | 231 | 315 |
| PEG-1107 | 231 | 316 |
| PEG-1108 | 231 | 317 |
| PEG-1109 | 231 | 318 |
| PEG-1110 | 231 | 319 |
| PEG-1111 | 231 | 320 |
| PEG-1112 | 231 | 321 |
| PEG-1113 | 231 | 322 |
| PEG-1114 | 232 | 314 |
| PEG-1115 | 232 | 315 |
| PEG-1116 | 232 | 316 |
| PEG-1117 | 232 | 317 |
| PEG-1118 | 232 | 318 |
| PEG-1119 | 232 | 319 |
| PEG-1120 | 232 | 320 |
| PEG-1121 | 232 | 321 |
| PEG-1122 | 232 | 322 |
| PEG-1123 | 233 | 314 |
| PEG-1124 | 233 | 315 |
| PEG-1125 | 233 | 316 |
| PEG-1126 | 233 | 317 |
| PEG-1127 | 233 | 318 |
| PEG-1128 | 233 | 319 |
| PEG-1129 | 233 | 320 |
| PEG-1130 | 233 | 321 |
| PEG-1131 | 233 | 322 |
| PEG-1132 | 234 | 314 |
| PEG-1133 | 234 | 315 |
| PEG-1134 | 234 | 316 |
| PEG-1135 | 234 | 317 |
| PEG-1136 | 234 | 318 |
| PEG-1137 | 234 | 319 |
| PEG-1138 | 234 | 320 |
| PEG-1139 | 234 | 321 |
| PEG-1140 | 234 | 322 |
| PEG-1141 | 235 | 314 |
| PEG-1142 | 235 | 315 |
| PEG-1143 | 235 | 316 |
| PEG-1144 | 235 | 317 |
| PEG-1145 | 235 | 318 |
| PEG-1146 | 235 | 319 |
| PEG-1147 | 235 | 320 |
| PEG-1148 | 235 | 321 |
| PEG-1149 | 235 | 322 |
| PEG-1150 | 236 | 314 |
| PEG-1151 | 236 | 315 |
| PEG-1152 | 236 | 316 |
| PEG-1153 | 236 | 317 |
| PEG-1154 | 236 | 318 |
| PEG-1155 | 236 | 319 |
| PEG-1156 | 236 | 320 |
| PEG-1157 | 236 | 321 |
| PEG-1158 | 236 | 322 |

TABLE 18a
Exemplary RTT sequences for Spacer S10

| SEQ ID NO: | Sequence | SEQ ID NO: | Sequence |
|---|---|---|---|
| 237 | ACCAAAUACAGCUCCCAAU | 240 | GAAACCAAAUACAGCUCCCAAUACC |
| | ACCAGGAUCCAGAG | | AGGAUCCAGAG |
| 238 | AACCAAAUACAGCUCCCAA | 241 | AGAAACCAAAUACAGCUCCCAAUAC |
| | UACCAGGAUCCAGAG | | CAGGAUCCAGAG |
| 239 | AAACCAAAUACAGCUCCCA | | |
| | AUACCAGGAUCCAGAG | | |

TABLE 18b
Exemplary PBS sequences for Spacer S10

| | Sequence |
|---|---|
| SEQ REF NO: 323 | CUGCCAA |
| SEQ REF NO: 324 | CUGCCAAG |
| SEQ REF NO: 325 | CUGCCAAGG |
| SEQ ID NO: 326 | CUGCCAAGGG |
| SEQ ID NO: 327 | CUGCCAAGGGC |
| SEQ ID NO: 328 | CUGCCAAGGGCA |
| SEQ ID NO: 329 | CUGCCAAGGGCAG |
| SEQ ID NO: 330 | CUGCCAAGGGCAGA |
| SEQ ID NO: 331 | CUGCCAAGGGCAGAG |

TABLE 18c
Exemplary RTT/PBS Combinations with Spacer S10

| PEG # | RTT | PBS |
|---|---|---|
| PEG-1159 | 237 | 323 |
| PEG-1160 | 237 | 324 |
| PEG-1161 | 237 | 325 |
| PEG-1162 | 237 | 326 |
| PEG-1163 | 237 | 327 |
| PEG-1164 | 237 | 328 |
| PEG-1165 | 237 | 329 |
| PEG-1166 | 237 | 330 |
| PEG-1167 | 237 | 331 |
| PEG-1168 | 238 | 323 |
| PEG-1169 | 238 | 324 |
| PEG-1170 | 238 | 325 |
| PEG-1171 | 238 | 326 |
| PEG-1172 | 238 | 327 |
| PEG-1173 | 238 | 328 |
| PEG-1174 | 238 | 329 |
| PEG-1175 | 238 | 330 |
| PEG-1176 | 238 | 331 |
| PEG-1177 | 239 | 323 |
| PEG-1178 | 239 | 324 |
| PEG-1179 | 239 | 325 |
| PEG-1180 | 239 | 326 |
| PEG-1181 | 239 | 327 |
| PEG-1182 | 239 | 328 |
| PEG-1183 | 239 | 329 |
| PEG-1184 | 239 | 330 |
| PEG-1185 | 239 | 331 |
| PEG-1186 | 240 | 323 |
| PEG-1187 | 240 | 324 |
| PEG-1188 | 240 | 325 |
| PEG-1189 | 240 | 326 |
| PEG-1190 | 240 | 327 |
| PEG-1191 | 240 | 328 |
| PEG-1192 | 240 | 329 |
| PEG-1193 | 240 | 330 |
| PEG-1194 | 240 | 331 |
| PEG-1195 | 241 | 323 |
| PEG-1196 | 241 | 324 |
| PEG-1197 | 241 | 325 |
| PEG-1198 | 241 | 326 |
| PEG-1199 | 241 | 327 |
| PEG-1200 | 241 | 328 |
| PEG-1201 | 241 | 329 |
| PEG-1202 | 241 | 330 |
| PEG-1203 | 241 | 331 |

TABLE 18d
Correction of G339C using PE2 systems, experiment 1.

| PEG # | Edit % | Indel % |
|---|---|---|
| PEG-0011 | 1% | 1% |
| PEG-0011 | 1% | 1% |
| PEG-0013 | 0% | 1% |
| PEG-0013 | 1% | 1% |
| PEG-0015 | 0% | 0% |
| PEG-0015 | 7% | 15% |
| PEG-0017 | 0% | 0% |
| PEG-0017 | 1% | 1% |
| PEG-0029 | 17% | 1% |
| PEG-0029 | 24% | 15% |
| PEG-0031 | 1% | 0% |
| PEG-0031 | 18% | 2% |
| PEG-0033 | 19% | 2% |
| PEG-0033 | 20% | 2% |
| PEG-0035 | 22% | 2% |
| PEG-0035 | 1% | 0% |
| PEG-0047 | 26% | 1% |
| PEG-0047 | 40% | 15% |
| PEG-0049 | 38% | 2% |
| PEG-0049 | 31% | 4% |
| PEG-0051 | 1% | 0% |
| PEG-0051 | 56% | 2% |
| PEG-0053 | 7% | 1% |
| PEG-0053 | 33% | 4% |
| PEG-0065 | 39% | 2% |
| PEG-0065 | 46% | 3% |
| PEG-0067 | 41% | 2% |
| PEG-0067 | 33% | 1% |
| PEG-0069 | 39% | 4% |
| PEG-0069 | 41% | 6% |
| PEG-0071 | 29% | 2% |
| PEG-0071 | 0% | 0% |
| PEG-0092 | 19% | 2% |
| PEG-0092 | 19% | 2% |
| PEG-0094 | 27% | 2% |
| PEG-0094 | 19% | 1% |
| PEG-0096 | 24% | 3% |
| PEG-0096 | 23% | 1% |
| PEG-0098 | 1% | 0% |
| PEG-0098 | 1% | 0% |
| PEG-0110 | 25% | 4% |
| PEG-0110 | 24% | 2% |
| PEG-0112 | 28% | 2% |
| PEG-0112 | 28% | 1% |
| PEG-0114 | 30% | 4% |
| PEG-0114 | 35% | 2% |
| PEG-0116 | 1% | 0% |
| PEG-0116 | 19% | 1% |
| PEG-0209 | 3% | 1% |
| PEG-0211 | 2% | 1% |
| PEG-0213 | 2% | 1% |
| PEG-0215 | 3% | 1% |
| PEG-0236 | 10% | 1% |
| PEG-0238 | 21% | 3% |
| PEG-0240 | 4% | 0% |
| PEG-0242 | 3% | 0% |
| PEG-0263 | 9% | 2% |
| PEG-0265 | 16% | 2% |
| PEG-0267 | 8% | 1% |
| PEG-0269 | 6% | 0% |
| PEG-0290 | 8% | 1% |
| PEG-0292 | 21% | 2% |
| PEG-0326 | 2% | 1% |
| PEG-0328 | 2% | 0% |
| PEG-0330 | 2% | 1% |
| PEG-0332 | 2% | 1% |
| PEG-0353 | 13% | 1% |
| PEG-0355 | 14% | 1% |
| PEG-0357 | 16% | 1% |
| PEG-0359 | 10% | 1% |
| PEG-0380 | 14% | 1% |
| PEG-0382 | 6% | 0% |
| PEG-0384 | 11% | 1% |
| PEG-0386 | 15% | 1% |
| PEG-0407 | 22% | 1% |
| PEG-0409 | 14% | 1% |
| PEG-0411 | 14% | 1% |
| PEG-0413 | 21% | 1% |
| PEG-0434 | 1% | 1% |
| PEG-0436 | 1% | 0% |
| PEG-0438 | 1% | 1% |
| PEG-0440 | 2% | 1% |
| PEG-0461 | 1% | 0% |
| PEG-0463 | 3% | 1% |
| PEG-0465 | 8% | 1% |
| PEG-0467 | 7% | 1% |
| PEG-0488 | 2% | 0% |
| PEG-0490 | 3% | 0% |
| PEG-0492 | 6% | 1% |
| PEG-0494 | 7% | 0% |
| PEG-0613 | 0% | 1% |
| PEG-0614 | 1% | 1% |
| PEG-0615 | 2% | 3% |
| PEG-0616 | 0% | 0% |
| PEG-0617 | 22% | 3% |
| PEG-0618 | 23% | 4% |
| PEG-0619 | 22% | 3% |
| PEG-0620 | 1% | 0% |
| PEG-0621 | 49% | 3% |
| PEG-0622 | 1% | 0% |
| PEG-0623 | 40% | 2% |
| PEG-0624 | 0% | 0% |
| PEG-0625 | 36% | 2% |
| PEG-0626 | 45% | 2% |
| PEG-0627 | 40% | 4% |
| PEG-0628 | 30% | 1% |
| PEG-0629 | 22% | 3% |
| PEG-0630 | 26% | 1% |
| PEG-0631 | 28% | 5% |
| PEG-0632 | 28% | 1% |
| PEG-0633 | 32% | 3% |
| PEG-0634 | 1% | 0% |
| PEG-0635 | 34% | 3% |
| PEG-0636 | 21% | 1% |
| PEG-0637 | 1% | 1% |
| PEG-0638 | 1% | 1% |
| PEG-0639 | 1% | 1% |
| PEG-0640 | 1% | 0% |
| PEG-0641 | 23% | 2% |
| PEG-0642 | 22% | 2% |
| PEG-0643 | 1% | 0% |
| PEG-0644 | 22% | 1% |
| PEG-0645 | 51% | 4% |
| PEG-0646 | 51% | 3% |
| PEG-0647 | 42% | 5% |
| PEG-0648 | 1% | 0% |
| PEG-0649 | 38% | 3% |
| PEG-0650 | 32% | 2% |
| PEG-0651 | 35% | 3% |
| PEG-0652 | 35% | 2% |
| PEG-0653 | 26% | 3% |
| PEG-0654 | 21% | 1% |
| PEG-0655 | 24% | 1% |
| PEG-0656 | 22% | 2% |
| PEG-0657 | 24% | 1% |
| PEG-0658 | 19% | 1% |
| PEG-0659 | 32% | 3% |
| PEG-0660 | 20% | 1% |
| PEG-0661 | 0% | 1% |
| PEG-0662 | 1% | 2% |
| PEG-0663 | 0% | 2% |
| PEG-0664 | 0% | 0% |
| PEG-0665 | 21% | 3% |
| PEG-0666 | 17% | 2% |
| PEG-0667 | 15% | 1% |
| PEG-0668 | 0% | 0% |
| PEG-0669 | 37% | 2% |
| PEG-0670 | 1% | 0% |
| PEG-0671 | 0% | 0% |
| PEG-0672 | 0% | 0% |
| PEG-0673 | 33% | 2% |
| PEG-0674 | 23% | 1% |
| PEG-0675 | 31% | 4% |
| PEG-0676 | 23% | 1% |
| PEG-0677 | 18% | 2% |
| PEG-0678 | 25% | 1% |
| PEG-0679 | 27% | 2% |
| PEG-0680 | 20% | 1% |
| PEG-0681 | 24% | 3% |
| PEG-0682 | 1% | 0% |
| PEG-0683 | 31% | 3% |
| PEG-0684 | 16% | 0% |
| PEG-0733 | 3% | 1% |
| PEG-0734 | 2% | 1% |
| PEG-0735 | 4% | 2% |
| PEG-0736 | 6% | 2% |
| PEG-0737 | 34% | 2% |
| PEG-0738 | 33% | 2% |
| PEG-0739 | 21% | 1% |
| PEG-0740 | 24% | 2% |
| PEG-0741 | 13% | 2% |
| PEG-0742 | 16% | 1% |
| PEG-0743 | 14% | 1% |
| PEG-0744 | 19% | 3% |
| PEG-0745 | 11% | 1% |
| PEG-0746 | 13% | 1% |
| PEG-0747 | 16% | 2% |
| PEG-0748 | 28% | 2% |
| PEG-0749 | 4% | 1% |
| PEG-0750 | 5% | 2% |
| PEG-0751 | 5% | 1% |
| PEG-0752 | 4% | 2% |
| PEG-0753 | 25% | 1% |
| PEG-0754 | 20% | 1% |
| PEG-0755 | 30% | 1% |
| PEG-0756 | 32% | 2% |
| PEG-0757 | 9% | 1% |
| PEG-0758 | 7% | 1% |
| PEG-0759 | 9% | 1% |
| PEG-0760 | 16% | 1% |
| PEG-0761 | 27% | 1% |
| PEG-0762 | 20% | 1% |
| PEG-0763 | 14% | 1% |
| PEG-0764 | 20% | 1% |
| PEG-0765 | 1% | 1% |
| PEG-0766 | 1% | 1% |
| PEG-0767 | 3% | 2% |
| PEG-0768 | 4% | 3% |
| PEG-0769 | 4% | 0% |
| PEG-0770 | 3% | 0% |
| PEG-0771 | 15% | 1% |
| PEG-0772 | 25% | 3% |
| PEG-0773 | 3% | 0% |
| PEG-0774 | 4% | 0% |
| PEG-0775 | 13% | 2% |
| PEG-0776 | 22% | 4% |
| PEG-0777 | 7% | 1% |
| PEG-0778 | 6% | 1% |
| PEG-0779 | 10% | 1% |
| PEG-0780 | 21% | 2% |
| PEG-0800 | 20% | 1% |
| PEG-0802 | 24% | 2% |
| PEG-0804 | 24% | 2% |
| PEG-0806 | 26% | |
| PEG-0809 | 20% | 6% |
| PEG-0811 | 22% | 2% |
| PEG-0813 | 16% | 5% |
| PEG-0815 | 14% | 2% |
| PEG-0818 | 28% | 3% |
| PEG-0820 | 4% | 0% |
| PEG-0822 | 16% | 1% |
| PEG-0824 | 18% | 1% |
| PEG-0827 | 29% | 1% |
| PEG-0829 | 37% | 2% |
| PEG-0831 | 35% | 2% |
| PEG-0833 | 34% | 1% |
| PEG-0836 | 37% | 1% |
| PEG-0838 | 42% | 2% |
| PEG-0840 | 39% | 4% |
| PEG-0842 | 1% | 0% |
| PEG-0845 | 39% | 2% |
| PEG-0847 | 1% | 0% |
| PEG-0849 | 26% | 2% |
| PEG-0851 | 32% | 1% |
| PEG-0854 | 33% | 2% |
| PEG-0856 | 31% | 1% |
| PEG-0858 | 22% | 2% |
| PEG-0860 | 2% | 0% |
| PEG-0863 | 30% | 2% |
| PEG-0865 | 19% | 1% |
| PEG-0867 | 0% | 0% |
| PEG-0869 | 17% | 1% |
| PEG-0872 | 28% | 1% |
| PEG-0874 | 0% | 0% |
| PEG-0876 | 0% | 0% |
| PEG-0878 | 14% | 1% |
| PEG-0944 | 28% | 1% |
| PEG-0946 | 36% | 1% |
| PEG-0948 | 32% | 2% |
| PEG-0950 | 34% | 1% |
| PEG-0962 | 35% | 1% |
| PEG-0964 | 39% | 2% |
| PEG-0966 | 34% | 4% |
| PEG-0968 | 1% | 0% |
| PEG-0980 | 38% | 2% |
| PEG-0982 | 1% | 0% |
| PEG-0984 | 24% | 2% |
| PEG-0986 | 29% | 1% |
| PEG-0998 | 36% | 2% |
| PEG-1000 | 25% | 2% |
| PEG-1002 | 13% | 1% |
| PEG-1004 | 17% | 1% |
| PEG-1016 | 21% | 1% |
| PEG-1018 | 0% | 0% |
| PEG-1020 | 13% | 1% |
| PEG-1022 | 0% | 0% |
| PEG-1070 | 1% | 0% |
| PEG-1072 | 2% | 0% |
| PEG-1074 | 1% | 0% |
| PEG-1076 | 2% | 1% |
| PEG-1097 | 5% | 0% |
| PEG-1099 | 3% | 0% |
| PEG-1101 | 12% | 0% |
| PEG-1103 | 10% | 1% |
| PEG-1133 | 3% | 0% |
| PEG-1135 | 4% | 0% |
| PEG-1137 | 4% | 0% |
| PEG-1139 | 4% | 1% |
| PEG-1151 | 2% | 1% |
| PEG-1153 | 2% | 0% |
| PEG-1155 | 1% | 0% |
| PEG-1157 | 3% | 0% |
| PEG-1204 | 29% | 1% |
| PEG-1205 | 0% | 0% |
| PEG-1206 | 11% | 1% |
| PEG-1207 | 0% | 0% |
| PEG-1208 | 30% | |
| PEG-1209 | 7% | |
| PEG-1210 | 2% | |
| PEG-1211 | 1% | 0% |
| PEG-1212 | 40% | 2% |
| PEG-1213 | 42% | 2% |
| PEG-1214 | 28% | 2% |
| PEG-1215 | 32% | 1% |
| PEG-1216 | 41% | 3% |
| PEG-1217 | 37% | 1% |
| PEG-1218 | 21% | 2% |
| PEG-1219 | 21% | 1% |
| PEG-1220 | 30% | 1% |
| PEG-1221 | 7% | |
| PEG-1222 | 2% | 0% |
| PEG-1223 | 1% | 0% |
| PEG-1224 | 36% | 1% |
| PEG-1225 | 12% | 0% |
| PEG-1226 | 29% | 1% |
| PEG-1227 | 1% | 0% |
| PEG-1228 | 40% | 3% |
| PEG-1229 | 12% | 0% |
| PEG-1230 | 1% | 0% |
| PEG-1231 | 1% | 0% |
| PEG-1232 | 29% | 2% |
| PEG-1233 | 35% | 2% |
| PEG-1234 | 23% | 2% |
| PEG-1235 | 1% | 0% |
| PEG-1236 | 39% | 2% |
| PEG-1237 | 33% | 2% |
| PEG-1238 | 21% | 1% |
| PEG-1239 | 0% | 0% |
| PEG-1240 | 30% | 3% |
| PEG-1241 | 2% | 0% |
| PEG-1242 | 16% | 1% |
| PEG-1243 | 27% | 1% |
| PEG-1244 | 28% | 2% |
| PEG-1245 | 31% | 4% |
| PEG-1246 | 34% | 3% |
| PEG-1247 | 41% | 20% |
| PEG-1248 | 34% | 1% |
| PEG-1249 | 1% | 0% |
| PEG-1250 | 24% | 1% |
| PEG-1251 | 1% | 0% |
| PEG-1252 | 45% | 2% |
| PEG-1253 | 12% | 1% |
| PEG-1254 | 23% | 1% |
| PEG-1256 | 29% | 1% |
| PEG-1257 | 23% | 2% |
| PEG-1258 | 18% | 1% |
| PEG-1259 | 22% | 1% |
| PEG-1260 | 17% | 1% |
| PEG-1261 | 18% | 1% |
| PEG-1262 | 12% | 1% |
| PEG-1263 | 15% | 1% |
| PEG-4001 | 25% | 1% |
| PEG-4002 | 22% | 1% |
| PEG-4003 | 15% | 1% |
| PEG-4004 | 13% | 1% |

TABLE 18e
Correction of G339C using PE2 systems,
experiment 2 (indel % not reported).

| PEG # | Edit % |
|---|---|
| PEG-0011 | 0% |
| PEG-0011 | 3% |
| PEG-0013 | 0% |
| PEG-0013 | 0% |
| PEG-0015 | 0% |
| PEG-0015 | 2% |
| PEG-0017 | 0% |
| PEG-0017 | 1% |
| PEG-0029 | 5% |
| PEG-0029 | 11% |
| PEG-0031 | 0% |
| PEG-0031 | 10% |
| PEG-0033 | 10% |
| PEG-0033 | 5% |
| PEG-0035 | 5% |
| PEG-0035 | 0% |
| PEG-0047 | 15% |
| PEG-0047 | 11% |
| PEG-0049 | 20% |
| PEG-0049 | 13% |
| PEG-0051 | 0% |
| PEG-0051 | 49% |
| PEG-0053 | 6% |
| PEG-0053 | 30% |
| PEG-0065 | 19% |
| PEG-0065 | 18% |
| PEG-0067 | 17% |
| PEG-0067 | 12% |
| PEG-0069 | 19% |
| PEG-0069 | 14% |
| PEG-0071 | 13% |
| PEG-0071 | 0% |
| PEG-0092 | 7% |
| PEG-0092 | 7% |
| PEG-0094 | 10% |
| PEG-0094 | 4% |
| PEG-0096 | 11% |
| PEG-0096 | 9% |
| PEG-0098 | 0% |
| PEG-0098 | 0% |
| PEG-0110 | 10% |
| PEG-0110 | 5% |
| PEG-0112 | 11% |
| PEG-0112 | 4% |
| PEG-0114 | 15% |
| PEG-0114 | 14% |
| PEG-0116 | 0% |
| PEG-0116 | 12% |
| PEG-0209 | 1% |
| PEG-0211 | 1% |
| PEG-0213 | 1% |
| PEG-0215 | 1% |
| PEG-0236 | 5% |
| PEG-0238 | 4% |
| PEG-0240 | 4% |
| PEG-0242 | 6% |
| PEG-0263 | 3% |
| PEG-0265 | 2% |
| PEG-0267 | 5% |
| PEG-0269 | 7% |
| PEG-0290 | 7% |
| PEG-0292 | 7% |
| PEG-0326 | 1% |
| PEG-0328 | 1% |
| PEG-0330 | 1% |
| PEG-0332 | 1% |
| PEG-0353 | 3% |
| PEG-0355 | 5% |
| PEG-0357 | 5% |
| PEG-0359 | 4% |
| PEG-0380 | 3% |
| PEG-0382 | 1% |
| PEG-0384 | 5% |
| PEG-0386 | 6% |
| PEG-0407 | 12% |
| PEG-0409 | 12% |
| PEG-0411 | 9% |
| PEG-0413 | 11% |
| PEG-0434 | 0% |
| PEG-0436 | 0% |
| PEG-0438 | 2% |
| PEG-0440 | 0% |
| PEG-0461 | 3% |
| PEG-0463 | 3% |
| PEG-0465 | 6% |
| PEG-0467 | 4% |
| PEG-0488 | 1% |
| PEG-0490 | 1% |
| PEG-0492 | 4% |
| PEG-0494 | 3% |
| PEG-0613 | 0% |
| PEG-0614 | 1% |
| PEG-0615 | 1% |
| PEG-0616 | 0% |
| PEG-0617 | 10% |
| PEG-0618 | 5% |
| PEG-0619 | 5% |
| PEG-0620 | 0% |
| PEG-0621 | 19% |
| PEG-0622 | 0% |
| PEG-0623 | 19% |
| PEG-0624 | 1% |
| PEG-0625 | 19% |
| PEG-0626 | 21% |
| PEG-0627 | 19% |
| PEG-0628 | 10% |
| PEG-0629 | 10% |
| PEG-0630 | 8% |
| PEG-0631 | 10% |
| PEG-0632 | 11% |
| PEG-0633 | 10% |
| PEG-0634 | 0% |
| PEG-0635 | 14% |
| PEG-0636 | 16% |
| PEG-0637 | 0% |
| PEG-0638 | 1% |
| PEG-0639 | 1% |
| PEG-0640 | 0% |
| PEG-0641 | 12% |
| PEG-0642 | 11% |
| PEG-0643 | 0% |
| PEG-0644 | 8% |
| PEG-0645 | 12% |
| PEG-0646 | 22% |
| PEG-0647 | 15% |
| PEG-0648 | 0% |
| PEG-0649 | 18% |
| PEG-0650 | 12% |
| PEG-0651 | 15% |
| PEG-0652 | 11% |
| PEG-0653 | 8% |
| PEG-0654 | 8% |
| PEG-0655 | 8% |
| PEG-0656 | 8% |
| PEG-0657 | 9% |
| PEG-0658 | 7% |
| PEG-0659 | 17% |
| PEG-0660 | 16% |
| PEG-0661 | 1% |
| PEG-0662 | 0% |
| PEG-0663 | 0% |
| PEG-0664 | 0% |
| PEG-0665 | 3% |
| PEG-0666 | 4% |
| PEG-0667 | 5% |
| PEG-0668 | 0% |
| PEG-0669 | 13% |
| PEG-0670 | 0% |
| PEG-0671 | 0% |
| PEG-0672 | 0% |
| PEG-0673 | 17% |
| PEG-0674 | 7% |
| PEG-0675 | 12% |
| PEG-0676 | 9% |
| PEG-0677 | 7% |
| PEG-0678 | 6% |
| PEG-0679 | 10% |
| PEG-0680 | 8% |
| PEG-0681 | 8% |
| PEG-0682 | 0% |
| PEG-0683 | 19% |
| PEG-0684 | 10% |
| PEG-0733 | 2% |
| PEG-0734 | 1% |
| PEG-0735 | 3% |
| PEG-0736 | 3% |
| PEG-0737 | 12% |
| PEG-0738 | 13% |
| PEG-0739 | 13% |
| PEG-0740 | 10% |
| PEG-0741 | 4% |
| PEG-0742 | 3% |
| PEG-0743 | 2% |
| PEG-0744 | 11% |
| PEG-0745 | 11% |
| PEG-0746 | 9% |
| PEG-0747 | 10% |
| PEG-0748 | 19% |
| PEG-0749 | 2% |
| PEG-0750 | 0% |
| PEG-0751 | 1% |
| PEG-0752 | 1% |
| PEG-0753 | 3% |
| PEG-0754 | 4% |
| PEG-0755 | 6% |
| PEG-0756 | 6% |
| PEG-0757 | 3% |
| PEG-0758 | 4% |
| PEG-0759 | 9% |
| PEG-0760 | 9% |
| PEG-0761 | 8% |
| PEG-0762 | 4% |
| PEG-0763 | 5% |
| PEG-0764 | 5% |
| PEG-0765 | 0% |
| PEG-0766 | 1% |
| PEG-0767 | 0% |
| PEG-0768 | 1% |
| PEG-0769 | 1% |
| PEG-0770 | 3% |
| PEG-0771 | 6% |
| PEG-0772 | 10% |
| PEG-0773 | 1% |
| PEG-0774 | 1% |
| PEG-0775 | 3% |
| PEG-0776 | 10% |
| PEG-0777 | 1% |
| PEG-0778 | 1% |
| PEG-0779 | 2% |
| PEG-0780 | 5% |
| PEG-0800 | 24% |
| PEG-0802 | 0% |
| PEG-0804 | 16% |
| PEG-0806 | 0% |
| PEG-0809 | 19% |
| PEG-0811 | 0% |
| PEG-0813 | 0% |
| PEG-0815 | 0% |
| PEG-0818 | 21% |
| PEG-0820 | 17% |
| PEG-0822 | 21% |
| PEG-0824 | 0% |
| PEG-0827 | 22% |
| PEG-0829 | 14% |
| PEG-0831 | 13% |
| PEG-0833 | 19% |
| PEG-0836 | 27% |
| PEG-0838 | 13% |
| PEG-0840 | 20% |
| PEG-0842 | 14% |
| PEG-0845 | 20% |
| PEG-0847 | 23% |
| PEG-0849 | 0% |
| PEG-0851 | 23% |
| PEG-0854 | 19% |
| PEG-0856 | 20% |
| PEG-0858 | 14% |
| PEG-0860 | 0% |
| PEG-0863 | 9% |
| PEG-0865 | 9% |
| PEG-0867 | 0% |
| PEG-0869 | 5% |
| PEG-0872 | 15% |
| PEG-0874 | 0% |
| PEG-0876 | 0% |
| PEG-0878 | 15% |
| PEG-0944 | 12% |
| PEG-0946 | 19% |
| PEG-0948 | 14% |
| PEG-0950 | 13% |
| PEG-0962 | 14% |
| PEG-0964 | 19% |
| PEG-0966 | 19% |
| PEG-0968 | 0% |
| PEG-0980 | 17% |
| PEG-0982 | 0% |
| PEG-0984 | 13% |
| PEG-0986 | 24% |
| PEG-0998 | 12% |
| PEG-1000 | 10% |
| PEG-1002 | 4% |
| PEG-1004 | 5% |
| PEG-1016 | 8% |
| PEG-1018 | 0% |
| PEG-1020 | 2% |
| PEG-1022 | 0% |
| PEG-1070 | 0% |
| PEG-1072 | 0% |
| PEG-1074 | 1% |
| PEG-1076 | 1% |
| PEG-1097 | 2% |
| PEG-1099 | 2% |
| PEG-1101 | 2% |
| PEG-1103 | 4% |
| PEG-1133 | 1% |
| PEG-1135 | 5% |
| PEG-1137 | 3% |
| PEG-1139 | 4% |
| PEG-1151 | 0% |
| PEG-1153 | 2% |
| PEG-1155 | 1% |
| PEG-1157 | 1% |
| PEG-1204 | 16% |
| PEG-1205 | 0% |
| PEG-1206 | 8% |
| PEG-1207 | 0% |
| PEG-1208 | 20% |
| PEG-1209 | 0% |
| PEG-1210 | 20% |
| PEG-1211 | 15% |
| PEG-1212 | 17% |
| PEG-1213 | 18% |
| PEG-1214 | 11% |
| PEG-1215 | 12% |
| PEG-1216 | 18% |
| PEG-1217 | 10% |
| PEG-1218 | 10% |
| PEG-1219 | 13% |
| PEG-1220 | 16% |
| PEG-1221 | 0% |
| PEG-1222 | 1% |
| PEG-1223 | 0% |
| PEG-1224 | 14% |
| PEG-1225 | 2% |
| PEG-1226 | 10% |
| PEG-1227 | 0% |
| PEG-1228 | 16% |
| PEG-1229 | 3% |
| PEG-1230 | 0% |
| PEG-1231 | 0% |
| PEG-1232 | 15% |
| PEG-1233 | 15% |
| PEG-1234 | 6% |
| PEG-1235 | 0% |
| PEG-1236 | 8% |
| PEG-1237 | 8% |
| PEG-1238 | 3% |
| PEG-1239 | 0% |
| PEG-1240 | 7% |
| PEG-1241 | 1% |
| PEG-1242 | 10% |
| PEG-1243 | 19% |
| PEG-1244 | 13% |
| PEG-1245 | 13% |
| PEG-1246 | 24% |
| PEG-1247 | 19% |
| PEG-1248 | 0% |
| PEG-1249 | 8% |
| PEG-1250 | 0% |
| PEG-1251 | 16% |
| PEG-1252 | 6% |
| PEG-1253 | 16% |
| PEG-1254 | 0% |
| PEG-1256 | 21% |
| PEG-1257 | 11% |
| PEG-1258 | 4% |
| PEG-1259 | 4% |
| PEG-1260 | 5% |
| PEG-1261 | 4% |
| PEG-1262 | 4% |
| PEG-1263 | 5% |
| PEG-4001 | 7% |
| PEG-4002 | 6% |
| PEG-4003 | 4% |
| PEG-4004 | 3% |

TABLE 18f
Correction of G339C using PE2 systems, experiment 3.

| PEG # | Edit % | Indel % | PEG # | Edit % | Indel % | PEG # | Edit % | Indel % | PEG # | Edit % | Indel % |
|---|---|---|---|---|---|---|---|---|---|---|---|
| PEG-0038 | 16% | 2% | PEG-0953 | 15% | 1% | PEG-4084 | 11% | 1% | PEG-4253 | 3% | 1% |
| PEG-0039 | 17% | 6% | PEG-0954 | 15% | 1% | PEG-4085 | 8% | 1% | PEG-4254 | 2% | 1% |
| PEG-0040 | 14% | 2% | PEG-0955 | 25% | 1% | PEG-4086 | 7% | 0% | PEG-4255 | 2% | 0% |
| PEG-0041 | 19% | 5% | PEG-0956 | 25% | 1% | PEG-4087 | 9% | 1% | PEG-4256 | 1% | 0% |
| PEG-0042 | 17% | 3% | PEG-0957 | 21% | 1% | PEG-4088 | 7% | 1% | PEG-4257 | 2% | 0% |
| PEG-0043 | 16% | 3% | PEG-0958 | 10% | 0% | PEG-4089 | 11% | 1% | PEG-4258 | 2% | 0% |
| PEG-0044 | 9% | 1% | PEG-0959 | 9% | 1% | PEG-4090 | 16% | 1% | PEG-4259 | 2% | 1% |
| PEG-0047 | 31% | 5% | PEG-0962 | 13% | 0% | PEG-4091 | 20% | 1% | PEG-4260 | 5% | 1% |
| PEG-0048 | 27% | 8% | PEG-0963 | 14% | 1% | PEG-4092 | 11% | 1% | PEG-0771 | 5% | 1% |
| PEG-0049 | 35% | 6% | PEG-0964 | 26% | 1% | PEG-4093 | 22% | 2% | PEG-4262 | 7% | 1% |
| PEG-0050 | 21% | 7% | PEG-0965 | 29% | 1% | PEG-4094 | 18% | 2% | PEG-4263 | 5% | 1% |
| PEG-0051 | 25% | 4% | PEG-0966 | 15% | 1% | PEG-4095 | 29% | 1% | PEG-4264 | 4% | 1% |
| PEG-0052 | 18% | 3% | PEG-0967 | 8% | 0% | PEG-4096 | 18% | 1% | PEG-0775 | 3% | 0% |
| PEG-0053 | 17% | 2% | PEG-0968 | 12% | 1% | PEG-4097 | 14% | 1% | PEG-4266 | 2% | 0% |
| PEG-0056 | 23% | 5% | PEG-0971 | 11% | 0% | PEG-4099 | 18% | 1% | PEG-4267 | 3% | 1% |
| PEG-0057 | 22% | 8% | PEG-0972 | 12% | 1% | PEG-4100 | 16% | 1% | PEG-0779 | 3% | 1% |
| PEG-0058 | 27% | 10% | PEG-0973 | 25% | 1% | PEG-4101 | 15% | 1% | PEG-4269 | 4% | 1% |
| PEG-0059 | 16% | 5% | PEG-0974 | 8% | 0% | PEG-4102 | 13% | 0% | PEG-4270 | 5% | 1% |
| PEG-0060 | 19% | 3% | PEG-0975 | 8% | 1% | PEG-4103 | 15% | 0% | PEG-4271 | 5% | 2% |
| PEG-0061 | 18% | 2% | PEG-0976 | 6% | 0% | PEG-4104 | 10% | 1% | PEG-4272 | 4% | 1% |
| PEG-0062 | 14% | 2% | PEG-0977 | 6% | 0% | PEG-4105 | 10% | 0% | PEG-4273 | 2% | 1% |
| PEG-0065 | 14% | 4% | PEG-0980 | 11% | 0% | PEG-4106 | 8% | 1% | PEG-4274 | 2% | 0% |
| PEG-0066 | 13% | 3% | PEG-0981 | 11% | 1% | PEG-4107 | 8% | 0% | PEG-4275 | 3% | 0% |
| PEG-0067 | 16% | 3% | PEG-0982 | 27% | 1% | PEG-4108 | 9% | 0% | PEG-4276 | 2% | 1% |
| PEG-0068 | 13% | 2% | PEG-0983 | 6% | 0% | PEG-4109 | 5% | 0% | PEG-4277 | 2% | 0% |
| PEG-0069 | 12% | 2% | PEG-0984 | 9% | 0% | PEG-4110 | 16% | 4% | PEG-4278 | 8% | 2% |
| PEG-0070 | 10% | 1% | PEG-0985 | 8% | 0% | PEG-4111 | 15% | 3% | PEG-0772 | 8% | 2% |
| PEG-0071 | 7% | 1% | PEG-0986 | 6% | 0% | PEG-4112 | 18% | 5% | PEG-4009 | 10% | 3% |
| PEG-0074 | 10% | 2% | PEG-0989 | 12% | 1% | PEG-4113 | 10% | 2% | PEG-4281 | 7% | 1% |
| PEG-0075 | 8% | 1% | PEG-0990 | 14% | 1% | PEG-4114 | 13% | 2% | PEG-4282 | 6% | 1% |
| PEG-0076 | 9% | 1% | PEG-0991 | 18% | 1% | PEG-4116 | 9% | 1% | PEG-0776 | 6% | 1% |
| PEG-0077 | 12% | 2% | PEG-0992 | 3% | 0% | PEG-4117 | 18% | 1% | PEG-4284 | 5% | 1% |
| PEG-0078 | 7% | 1% | PEG-0993 | 8% | 1% | PEG-4118 | 30% | 1% | PEG-4285 | 6% | 1% |
| PEG-0079 | 5% | 1% | PEG-0994 | 4% | 0% | PEG-4119 | 24% | 1% | PEG-0780 | 5% | 1% |
| PEG-0080 | 5% | 1% | PEG-0995 | 4% | 0% | PEG-4120 | 21% | 1% | PEG-4287 | 6% | 1% |
| PEG-0227 | 5% | 1% | PEG-0998 | 8% | 1% | PEG-4121 | 18% | 1% | PEG-0737 | 10% | 1% |
| PEG-0228 | 4% | 0% | PEG-0999 | 15% | 1% | PEG-4122 | 31% | 1% | PEG-4289 | 9% | 2% |
| PEG-0229 | 4% | 0% | PEG-1000 | 19% | 1% | PEG-4123 | 26% | 1% | PEG-4290 | 6% | 1% |
| PEG-0230 | 5% | 1% | PEG-1001 | 6% | 0% | PEG-4124 | 24% | 1% | PEG-4291 | 4% | 1% |
| PEG-0231 | 4% | 1% | PEG-1002 | 6% | 1% | PEG-4125 | 21% | 1% | PEG-0741 | 4% | 1% |
| PEG-0232 | 3% | 1% | PEG-1003 | 4% | 0% | PEG-4126 | 19% | 1% | PEG-4293 | 6% | 1% |
| PEG-0233 | 5% | 1% | PEG-1004 | 4% | 0% | PEG-4127 | 23% | 1% | PEG-4294 | 4% | 1% |
| PEG-0236 | 6% | 1% | PEG-1204 | 15% | 1% | PEG-4128 | 27% | 1% | PEG-0745 | 12% | 2% |
| PEG-0237 | 4% | 0% | PEG-1205 | 8% | 1% | PEG-4129 | 22% | 1% | PEG-4296 | 12% | 2% |
| PEG-0238 | 2% | 0% | PEG-1206 | 16% | 1% | PEG-4130 | 22% | 2% | PEG-4007 | 14% | 2% |
| PEG-0239 | 5% | 1% | PEG-1208 | 16% | 1% | PEG-4131 | 26% | 1% | PEG-4298 | 12% | 2% |
| PEG-0240 | 3% | 1% | PEG-1209 | 14% | 1% | PEG-4132 | 44% | 2% | PEG-4299 | 9% | 1% |
| PEG-0241 | 2% | 0% | PEG-1211 | 22% | 1% | PEG-4133 | 44% | 2% | PEG-4300 | 5% | 1% |
| PEG-0242 | 6% | 1% | PEG-1212 | 10% | 1% | PEG-4134 | 34% | 1% | PEG-4301 | 4% | 1% |
| PEG-0245 | 6% | 0% | PEG-1213 | 23% | 2% | PEG-4135 | 26% | 1% | PEG-4302 | 3% | 1% |
| PEG-0246 | 4% | 0% | PEG-1214 | 25% | 1% | PEG-4136 | 17% | 1% | PEG-4303 | 5% | 1% |
| PEG-0247 | 3% | 0% | PEG-1215 | 7% | 1% | PEG-4137 | 23% | 1% | PEG-4304 | 5% | 1% |
| PEG-0248 | 5% | 0% | PEG-1216 | 7% | 1% | PEG-4138 | 28% | 2% | PEG-4305 | 8% | 1% |
| PEG-0249 | 4% | 1% | PEG-1217 | 29% | 2% | PEG-4139 | 25% | 1% | PEG-0738 | 10% | 1% |
| PEG-0250 | 5% | 1% | PEG-1218 | 10% | 1% | PEG-4140 | 13% | 1% | PEG-4307 | 10% | 1% |
| PEG-0251 | 8% | 1% | PEG-1219 | 5% | 1% | PEG-4141 | 22% | 1% | PEG-4308 | 6% | 1% |
| PEG-0254 | 3% | 0% | PEG-1224 | 26% | 1% | PEG-4142 | 38% | 1% | PEG-4309 | 4% | 1% |
| PEG-0255 | 4% | 0% | PEG-1225 | 28% | 1% | PEG-4143 | 32% | 1% | PEG-0742 | 4% | 1% |
| PEG-0256 | 2% | 0% | PEG-1226 | 15% | 1% | PEG-4144 | 22% | 1% | PEG-4311 | 3% | 1% |
| PEG-0257 | 2% | 0% | PEG-1227 | 11% | 1% | PEG-4145 | 21% | 1% | PEG-4312 | 4% | 1% |
| PEG-0258 | 2% | 0% | PEG-1228 | 23% | 1% | PEG-4146 | 13% | 1% | PEG-0746 | 5% | 1% |
| PEG-0259 | 4% | 0% | PEG-1229 | 34% | 1% | PEG-4147 | 18% | 1% | PEG-4314 | 9% | 2% |
| PEG-0260 | 6% | 0% | PEG-1230 | 19% | 1% | PEG-4148 | 33% | 1% | PEG-4315 | 7% | 1% |
| PEG-0263 | 3% | 0% | PEG-1231 | 10% | 1% | PEG-4149 | 23% | 1% | PEG-4316 | 10% | 2% |
| PEG-0264 | 4% | 0% | PEG-1232 | 18% | 1% | PEG-4150 | 16% | 1% | PEG-4317 | 5% | 1% |
| PEG-0265 | 3% | 0% | PEG-1233 | 20% | 1% | PEG-4151 | 33% | 2% | PEG-4318 | 6% | 1% |
| PEG-0266 | 3% | 0% | PEG-1234 | 8% | 1% | PEG-4152 | 34% | 1% | PEG-4319 | 4% | 1% |
| PEG-0267 | 1% | 0% | PEG-1235 | 6% | 1% | PEG-4153 | 19% | 2% | PEG-4320 | 2% | 1% |
| PEG-0268 | 4% | 0% | PEG-1236 | 13% | 1% | PEG-4154 | 30% | 2% | PEG-4321 | 3% | 1% |
| PEG-0269 | 6% | 1% | PEG-1237 | 22% | 1% | PEG-4155 | 41% | 2% | PEG-4322 | 4% | 1% |
| PEG-0272 | 3% | 0% | PEG-1238 | 8% | 1% | PEG-4156 | 39% | 2% | PEG-4323 | 6% | 2% |
| PEG-0274 | 6% | 0% | PEG-1239 | 4% | 1% | PEG-4157 | 35% | 3% | PEG-0739 | 8% | 1% |
| PEG-0275 | 3% | 0% | PEG-1244 | 13% | 2% | PEG-4158 | 36% | 2% | PEG-4325 | 8% | 1% |
| PEG-0276 | 2% | 0% | PEG-1245 | 23% | 1% | PEG-4159 | 30% | 1% | PEG-4326 | 5% | 1% |
| PEG-0277 | 4% | 1% | PEG-1246 | 10% | 1% | PEG-4160 | 38% | 1% | PEG-4327 | 3% | 1% |
| PEG-0278 | 5% | 1% | PEG-1247 | 6% | 1% | PEG-4161 | 44% | 3% | PEG-0743 | 3% | 1% |
| PEG-0281 | 14% | 1% | PEG-1248 | 7% | 1% | PEG-4162 | 30% | 2% | PEG-4329 | 4% | 1% |
| PEG-0282 | 10% | 1% | PEG-1249 | 26% | 1% | PEG-4163 | 26% | 1% | PEG-4330 | 6% | 1% |
| PEG-0283 | 19% | 1% | PEG-1250 | 15% | 1% | PEG-4164 | 28% | 1% | PEG-0747 | 6% | 1% |
| PEG-0284 | 11% | 1% | PEG-1251 | 9% | 1% | PEG-4165 | 38% | 2% | PEG-4332 | 12% | 2% |
| PEG-0285 | 5% | 0% | PEG-1252 | 10% | 1% | PEG-4166 | 31% | 2% | PEG-4333 | 11% | 2% |
| PEG-0286 | 7% | 1% | PEG-1253 | 22% | 2% | PEG-4167 | 28% | 2% | PEG-4334 | 12% | 2% |
| PEG-0287 | 7% | 1% | PEG-1254 | 14% | 1% | PEG-4168 | 32% | 2% | PEG-4335 | 10% | 2% |
| PEG-0290 | 20% | 1% | PEG-1255 | 6% | 1% | PEG-4169 | 24% | 1% | PEG-4336 | 7% | 1% |
| PEG-0291 | 16% | 1% | PEG-1256 | 7% | 1% | PEG-4170 | 28% | 1% | PEG-4337 | 5% | 1% |
| PEG-0292 | 32% | 2% | PEG-1257 | 22% | 1% | PEG-4171 | 34% | 1% | PEG-4338 | 6% | 1% |
| PEG-0293 | 17% | 1% | PEG-1258 | 9% | 1% | PEG-4172 | 26% | 1% | PEG-4339 | 8% | 2% |
| PEG-0294 | 7% | 0% | PEG-1259 | 3% | 1% | PEG-4173 | 14% | 1% | PEG-4340 | 7% | 1% |
| PEG-0295 | 10% | 1% | PEG-4005 | 23% | 1% | PEG-4174 | 20% | 1% | PEG-4341 | 10% | 2% |
| PEG-0296 | 11% | 1% | PEG-4006 | 46% | 3% | PEG-4175 | 30% | 1% | PEG-0740 | 10% | 2% |
| PEG-0621 | 36% | 1% | PEG-4011 | 25% | 1% | PEG-4176 | 31% | 1% | PEG-4343 | 11% | 1% |
| PEG-0622 | 39% | 1% | PEG-4012 | 26% | 1% | PEG-4177 | 28% | 1% | PEG-4344 | 9% | 1% |
| PEG-0623 | 18% | 1% | PEG-4013 | 27% | 1% | PEG-4178 | 21% | 1% | PEG-4345 | 5% | 1% |
| PEG-0624 | 39% | 1% | PEG-4014 | 14% | 1% | PEG-4179 | 13% | 1% | PEG-0744 | 5% | 1% |
| PEG-0625 | 26% | 2% | PEG-4015 | 17% | 1% | PEG-4180 | 25% | 1% | PEG-4347 | 5% | 1% |
| PEG-0626 | 26% | 8% | PEG-4016 | 21% | 1% | PEG-4181 | 37% | 1% | PEG-4348 | 6% | 2% |
| PEG-0627 | 6% | 0% | PEG-4017 | 17% | 1% | PEG-4182 | 24% | 1% | PEG-0748 | 0% | 0% |
| PEG-0628 | 26% | 1% | PEG-4018 | 16% | 1% | PEG-4183 | 21% | 1% | PEG-4350 | 6% | 1% |
| PEG-0645 | 52% | 3% | PEG-4019 | 13% | 1% | PEG-4184 | 19% | 1% | PEG-0753 | 5% | 1% |
| PEG-0646 | 50% | 1% | PEG-4020 | 19% | 1% | PEG-4185 | 36% | 1% | PEG-4352 | 6% | 1% |
| PEG-0647 | 39% | 1% | PEG-4021 | 18% | 1% | PEG-4186 | 27% | 1% | PEG-4353 | 3% | 0% |
| PEG-0648 | 40% | 1% | PEG-4022 | 19% | 1% | PEG-4187 | 17% | 1% | PEG-4354 | 3% | 0% |
| PEG-0649 | 27% | 3% | PEG-4023 | 31% | 1% | PEG-4188 | 31% | 1% | PEG-0757 | 2% | 0% |
| PEG-0650 | 32% | 2% | PEG-4024 | 21% | 1% | PEG-4189 | 42% | 1% | PEG-4356 | 2% | 0% |
| PEG-0651 | 20% | 1% | PEG-4025 | 22% | 1% | PEG-4190 | 31% | 1% | PEG-4357 | 4% | 1% |
| PEG-0652 | 28% | 1% | PEG-4026 | 19% | 2% | PEG-4191 | 21% | 1% | PEG-0761 | 8% | 1% |
| PEG-0669 | 32% | 1% | PEG-4027 | 24% | 1% | PEG-4192 | 23% | 1% | PEG-4359 | 6% | 1% |
| PEG-0670 | 36% | 1% | PEG-4028 | 10% | 0% | PEG-4193 | 13% | 1% | PEG-4360 | 8% | 1% |
| PEG-0671 | 35% | 1% | PEG-4029 | 8% | 1% | PEG-4194 | 29% | 1% | PEG-4361 | 7% | 1% |
| PEG-0672 | 29% | 1% | PEG-4030 | 7% | 1% | PEG-4195 | 37% | 2% | PEG-4362 | 4% | 1% |
| PEG-0673 | 12% | 48% | PEG-4031 | 10% | 0% | PEG-4196 | 16% | 1% | PEG-4363 | 3% | 1% |
| PEG-0674 | 25% | 1% | PEG-4032 | 7% | 1% | PEG-4197 | 15% | 1% | PEG-4364 | 3% | 1% |
| PEG-0675 | 22% | 1% | PEG-4033 | 12% | 0% | PEG-4198 | 16% | 1% | PEG-4365 | 2% | 0% |
| PEG-0676 | 22% | 1% | PEG-4034 | 7% | 1% | PEG-4199 | 21% | 1% | PEG-4366 | 3% | 0% |
| PEG-0800 | 21% | 2% | PEG-4035 | 5% | 0% | PEG-4200 | 14% | 1% | PEG-4367 | 10% | 1% |
| PEG-0801 | 32% | 5% | PEG-4036 | 16% | 1% | PEG-4201 | 13% | 1% | PEG-4368 | 7% | 1% |
| PEG-0802 | 23% | 7% | PEG-4037 | 10% | 0% | PEG-4202 | 10% | 0% | PEG-0754 | 7% | 1% |
| PEG-0803 | 19% | 2% | PEG-4038 | 9% | 0% | PEG-4203 | 16% | 1% | PEG-4370 | 5% | 1% |
| PEG-0804 | 19% | 3% | PEG-4039 | 9% | 0% | PEG-4204 | 13% | 0% | PEG-4371 | 3% | 1% |
| PEG-0805 | 25% | 3% | PEG-4040 | 9% | 1% | PEG-4205 | 10% | 0% | PEG-4372 | 2% | 1% |
| PEG-0806 | 8% | 1% | PEG-4041 | 9% | 0% | PEG-4206 | 7% | 0% | PEG-0758 | 1% | 0% |
| PEG-0809 | 27% | 2% | PEG-4042 | 6% | 0% | PEG-4207 | 18% | 0% | PEG-4374 | 2% | 1% |
| PEG-0810 | 28% | 6% | PEG-4043 | 11% | 1% | PEG-4208 | 33% | 1% | PEG-4375 | 3% | 1% |
| PEG-0811 | 26% | 5% | PEG-4044 | 5% | 1% | PEG-4209 | 29% | 1% | PEG-0762 | 10% | 1% |
| PEG-0812 | 23% | 3% | PEG-4045 | 3% | 0% | PEG-4210 | 20% | 0% | PEG-4377 | 5% | 1% |
| PEG-0813 | 27% | 3% | PEG-4046 | 10% | 1% | PEG-4211 | 19% | 1% | PEG-4378 | 4% | 1% |
| PEG-0814 | 23% | 2% | PEG-4047 | 6% | 1% | PEG-4212 | 11% | 0% | PEG-4379 | 5% | 0% |
| PEG-0815 | 10% | 1% | PEG-4048 | 7% | 0% | PEG-4213 | 26% | 1% | PEG-4380 | 3% | 0% |
| PEG-0818 | 27% | 3% | PEG-4049 | 8% | 2% | PEG-4214 | 42% | 1% | PEG-4381 | 2% | 0% |
| PEG-0819 | 28% | 5% | PEG-4050 | 11% | 1% | PEG-4215 | 28% | 1% | PEG-4382 | 1% | 0% |
| PEG-0820 | 26% | 4% | PEG-4051 | 12% | 1% | PEG-4216 | 16% | 1% | PEG-4383 | 1% | 0% |
| PEG-0821 | 19% | 1% | PEG-4052 | 14% | 1% | PEG-4217 | 4% | 0% | PEG-4384 | 2% | 0% |
| PEG-0822 | 26% | 3% | PEG-4053 | 19% | 1% | PEG-4218 | 4% | 0% | PEG-4385 | 4% | 1% |
| PEG-0823 | 16% | 1% | PEG-4054 | 21% | 1% | PEG-4219 | 2% | 0% | PEG-4386 | 4% | 1% |
| PEG-0824 | 13% | 2% | PEG-4055 | 15% | 1% | PEG-4220 | 3% | 0% | PEG-0755 | 5% | 1% |
| PEG-0827 | 21% | 3% | PEG-4056 | 21% | 2% | PEG-4221 | 3% | 0% | PEG-4388 | 4% | 1% |
| PEG-0828 | 27% | 4% | PEG-4057 | 22% | 1% | PEG-4222 | 4% | 1% | PEG-4389 | 6% | 1% |
| PEG-0829 | 22% | 3% | PEG-4058 | 28% | 1% | PEG-4223 | 6% | 0% | PEG-4390 | 5% | 1% |
| PEG-0830 | 25% | 2% | PEG-4059 | 19% | 1% | PEG-4224 | 3% | 0% | PEG-0759 | 3% | 1% |
| PEG-0831 | 19% | 3% | PEG-4060 | 10% | 1% | PEG-0769 | 3% | 0% | PEG-4392 | 4% | 1% |
| PEG-0832 | 14% | 1% | PEG-4061 | 11% | 1% | PEG-4226 | 3% | 1% | PEG-4393 | 5% | 0% |
| PEG-0833 | 10% | 1% | PEG-4062 | 8% | 1% | PEG-4227 | 2% | 1% | PEG-0763 | 6% | 1% |
| PEG-0836 | 24% | 3% | PEG-4063 | 10% | 1% | PEG-4230 | 1% | 0% | PEG-4395 | 7% | 1% |
| PEG-0837 | 31% | 4% | PEG-4064 | 11% | 1% | PEG-4231 | 2% | 1% | PEG-4396 | 8% | 1% |
| PEG-0838 | 18% | 3% | PEG-4065 | 4% | 1% | PEG-0777 | 3% | 0% | PEG-4397 | 8% | 1% |
| PEG-0839 | 20% | 3% | PEG-4066 | 11% | 1% | PEG-4233 | 2% | 0% | PEG-4398 | 8% | 2% |
| PEG-0840 | 17% | 2% | PEG-4067 | 15% | 1% | PEG-4235 | 3% | 0% | PEG-4399 | 4% | 1% |
| PEG-0841 | 13% | 1% | PEG-4068 | 13% | 1% | PEG-4236 | 2% | 0% | PEG-4400 | 4% | 1% |
| PEG-0842 | 9% | 2% | PEG-4069 | 7% | 1% | PEG-4237 | 1% | 0% | PEG-4401 | 1% | 0% |
| PEG-0845 | 22% | 2% | PEG-4070 | 10% | 1% | PEG-4238 | 1% | 0% | PEG-4402 | 2% | 0% |
| PEG-0846 | 20% | 3% | PEG-4071 | 7% | 0% | PEG-4239 | 1% | 0% | PEG-4403 | 3% | 1% |
| PEG-0847 | 16% | 1% | PEG-4072 | 8% | 0% | PEG-4240 | 1% | 0% | PEG-4404 | 2% | 1% |
| PEG-0848 | 17% | 2% | PEG-4073 | 6% | 0% | PEG-4241 | 2% | 0% | PEG-0756 | 2% | 1% |
| PEG-0849 | 20% | 3% | PEG-4074 | 4% | 0% | PEG-4242 | 2% | 0% | PEG-4406 | 4% | 1% |
| PEG-0850 | 8% | 1% | PEG-4075 | 3% | 0% | PEG-0770 | 1% | 0% | PEG-4407 | 2% | 0% |
| PEG-0851 | 9% | 1% | PEG-4076 | 9% | 1% | PEG-4244 | 2% | 1% | PEG-4408 | 2% | 0% |
| PEG-0944 | 21% | 1% | PEG-4077 | 8% | 1% | PEG-4245 | 2% | 0% | PEG-0760 | 2% | 1% |
| PEG-0945 | 16% | 1% | PEG-4078 | 5% | 1% | PEG-4246 | 2% | 0% | PEG-4410 | 2% | 1% |
| PEG-0946 | 30% | 1% | PEG-4079 | 8% | 1% | PEG-0774 | 2% | 1% | PEG-4411 | 3% | 1% |
| PEG-0947 | 21% | 1% | PEG-4080 | 5% | 1% | PEG-4248 | 1% | 0% | PEG-0764 | 4% | 1% |
| PEG-0948 | 15% | 1% | PEG-4081 | 12% | 1% | PEG-0778 | 3% | 0% | | | |
| PEG-0949 | 14% | 1% | PEG-4082 | 16% | 2% | PEG-4251 | 3% | 1% | | | |
| PEG-0950 | 9% | 1% | PEG-4083 | 14% | 1% | PEG-4252 | 3% | 1% | | | |

TABLE 18g
Correction of G339C using PE2 systems, experiment 4.

| PEG # | Edit % | Indel % | PEG # | Edit % | Indel % | PEG # | Edit % | Indel % | PEG # | Edit % | Indel % |
|---|---|---|---|---|---|---|---|---|---|---|---|
| PEG-0038 | 14.7% | 2.7% | PEG-0954 | 10.1% | 0.5% | PEG-4085 | 13.7% | 1.2% | PEG-4249 | 0.1% | 0.2% |
| PEG-0039 | 19.3% | 7.7% | PEG-0955 | 14.0% | 0.2% | PEG-4086 | 10.6% | 0.7% | PEG-0778 | 0.0% | 0.2% |
| PEG-0040 | 19.1% | 3.3% | PEG-0956 | 8.5% | 0.4% | PEG-4087 | 10.4% | 0.8% | PEG-4251 | 1.9% | 0.5% |
| PEG-0041 | 18.0% | 4.8% | PEG-0957 | 13.4% | 0.3% | PEG-4088 | 9.2% | 0.6% | PEG-4252 | 0.1% | 0.2% |
| PEG-0042 | 12.5% | 1.7% | PEG-0958 | 6.5% | 0.2% | PEG-4089 | 11.2% | 0.3% | PEG-4253 | 0.0% | 0.2% |
| PEG-0043 | 16.0% | 3.1% | PEG-0959 | 3.4% | 0.3% | PEG-4090 | 10.2% | 0.4% | PEG-4254 | 0.1% | 0.2% |
| PEG-0044 | 11.7% | 1.4% | PEG-0962 | 16.4% | 0.8% | PEG-4091 | 12.8% | 0.7% | PEG-4255 | 1.0% | 0.3% |
| PEG-0047 | 29.0% | 5.0% | PEG-0963 | 10.1% | 0.7% | PEG-4092 | 8.9% | 0.7% | PEG-4256 | 0.8% | 0.3% |
| PEG-0048 | 24.3% | 7.1% | PEG-0964 | 11.3% | 0.7% | PEG-4093 | 12.2% | 0.8% | PEG-4257 | 0.9% | 0.3% |
| PEG-0049 | 31.3% | 5.4% | PEG-0965 | 10.2% | 0.8% | PEG-4094 | 9.0% | 0.6% | PEG-4258 | 0.1% | 0.2% |
| PEG-0050 | 25.3% | 8.2% | PEG-0966 | 9.4% | 0.4% | PEG-4095 | 10.8% | 0.4% | PEG-4259 | 0.0% | 0.2% |
| PEG-0051 | 16.5% | 2.0% | PEG-0967 | 5.5% | 0.3% | PEG-4096 | 6.6% | 0.7% | PEG-4260 | 2.2% | 0.9% |
| PEG-0052 | 19.0% | 2.8% | PEG-0968 | 4.5% | 0.3% | PEG-4097 | 6.2% | 0.3% | PEG-0771 | 2.4% | 0.6% |
| PEG-0053 | 18.2% | 2.2% | PEG-0971 | 7.5% | 0.5% | PEG-4098 | 8.3% | 0.6% | PEG-4262 | 3.6% | 0.7% |
| PEG-0056 | 24.9% | 5.5% | PEG-0972 | 7.6% | 0.5% | PEG-4099 | 9.0% | 0.4% | PEG-4263 | 0.0% | 0.1% |
| PEG-0057 | 18.9% | 7.0% | PEG-0973 | 10.2% | 0.5% | PEG-4100 | 13.6% | 0.6% | PEG-4264 | 0.0% | 0.2% |
| PEG-0058 | 20.5% | 6.6% | PEG-0974 | 7.9% | 0.4% | PEG-4101 | 10.1% | 0.5% | PEG-0775 | 1.9% | 0.4% |
| PEG-0059 | 17.6% | 6.2% | PEG-0975 | 4.2% | 0.3% | PEG-4102 | 11.7% | 0.5% | PEG-4266 | 1.4% | 0.3% |
| PEG-0060 | 15.7% | 2.2% | PEG-0976 | 3.7% | 0.2% | PEG-4103 | 14.4% | 0.5% | PEG-4267 | 1.5% | 0.3% |
| PEG-0061 | 17.4% | 2.2% | PEG-0977 | 2.6% | 0.3% | PEG-4104 | 6.0% | 0.3% | PEG-0779 | 1.3% | 0.2% |
| PEG-0062 | 13.2% | 1.8% | PEG-0980 | 10.7% | 0.5% | PEG-4105 | 5.2% | 0.3% | PEG-4269 | 4.3% | 1.1% |
| PEG-0065 | 13.6% | 5.7% | PEG-0981 | 10.1% | 0.4% | PEG-4106 | 3.0% | 0.3% | PEG-4270 | 4.1% | 1.0% |
| PEG-0066 | 13.9% | 3.0% | PEG-0982 | 7.9% | 0.3% | PEG-4107 | 2.8% | 0.2% | PEG-4271 | 4.1% | 1.2% |
| PEG-0067 | 17.8% | 3.8% | PEG-0983 | 6.9% | 0.4% | PEG-4108 | 10.4% | 0.6% | PEG-4272 | 3.3% | 0.5% |
| PEG-0068 | 14.3% | 2.5% | PEG-0984 | 4.4% | 0.2% | PEG-4109 | 9.7% | 0.7% | PEG-4273 | 1.8% | 0.3% |
| PEG-0069 | 9.3% | 1.5% | PEG-0985 | 2.4% | 0.1% | PEG-4110 | 17.4% | 5.0% | PEG-4274 | 2.7% | 0.5% |
| PEG-0070 | 9.5% | 1.2% | PEG-0986 | 2.5% | 0.3% | PEG-4111 | 14.0% | 3.8% | PEG-4275 | 2.2% | 0.3% |
| PEG-0071 | 6.7% | 1.3% | PEG-0989 | 8.1% | 0.4% | PEG-4112 | 13.6% | 4.0% | PEG-4276 | 2.2% | 0.6% |
| PEG-0074 | 9.3% | 3.1% | PEG-0990 | 6.3% | 0.2% | PEG-4113 | 13.3% | 2.2% | PEG-4277 | 1.5% | 0.5% |
| PEG-0075 | 8.1% | 1.3% | PEG-0991 | 5.0% | 0.3% | PEG-4114 | 9.7% | 1.4% | PEG-4278 | 7.5% | 2.6% |
| PEG-0076 | 12.2% | 1.6% | PEG-0992 | 5.3% | 0.4% | PEG-4115 | 9.7% | 1.2% | PEG-0772 | 6.2% | 1.7% |
| PEG-0077 | 6.8% | 0.7% | PEG-0993 | 4.4% | 0.3% | PEG-4116 | 8.1% | 0.8% | PEG-4009 | 5.4% | 0.9% |
| PEG-0078 | 7.6% | 1.0% | PEG-0994 | 2.1% | 0.3% | PEG-4117 | 21.4% | 0.6% | PEG-4281 | 4.4% | 0.6% |
| PEG-0079 | 3.1% | 0.4% | PEG-0995 | 2.9% | 0.2% | PEG-4118 | 25.2% | 1.1% | PEG-4282 | 5.3% | 0.6% |
| PEG-0080 | 4.6% | 0.7% | PEG-0998 | 4.2% | 0.3% | PEG-4119 | 17.6% | 0.6% | PEG-0776 | 4.1% | 0.6% |
| PEG-0227 | 2.0% | 0.3% | PEG-0999 | 8.2% | 0.4% | PEG-4120 | 6.6% | 0.5% | PEG-4284 | 3.6% | 1.0% |
| PEG-0228 | 3.0% | 0.4% | PEG-1000 | 5.8% | 0.5% | PEG-4121 | 18.4% | 0.8% | PEG-4285 | 3.7% | 0.5% |
| PEG-0229 | 3.2% | 0.3% | PEG-1001 | 3.8% | 0.3% | PEG-4122 | 37.5% | 1.3% | PEG-0780 | 4.4% | 0.8% |
| PEG-0230 | 3.3% | 0.5% | PEG-1002 | 4.6% | 0.4% | PEG-4123 | 28.3% | 1.2% | PEG-4287 | 6.5% | 1.4% |
| PEG-0231 | 1.8% | 0.6% | PEG-1003 | 1.5% | 0.1% | PEG-4124 | 13.8% | 0.8% | PEG-0737 | 7.4% | 0.7% |
| PEG-0232 | 2.1% | 0.4% | PEG-1004 | 2.8% | 0.2% | PEG-4125 | 12.1% | 0.5% | PEG-4289 | 7.5% | 1.5% |
| PEG-0233 | 2.7% | 0.3% | PEG-1204 | 7.7% | 0.8% | PEG-4126 | 11.3% | 0.7% | PEG-4290 | 5.8% | 0.8% |
| PEG-0236 | 2.0% | 0.3% | PEG-1205 | 9.2% | 0.8% | PEG-4127 | 16.5% | 0.9% | PEG-4291 | 5.6% | 0.8% |
| PEG-0237 | 5.0% | 0.3% | PEG-1206 | 8.5% | 0.7% | PEG-4128 | 15.8% | 0.9% | PEG-0741 | 2.8% | 0.6% |
| PEG-0238 | 2.1% | 0.2% | PEG-1207 | 8.4% | 0.6% | PEG-4129 | 14.2% | 0.6% | PEG-4293 | 3.4% | 0.4% |
| PEG-0239 | 4.0% | 0.5% | PEG-1208 | 5.8% | 0.4% | PEG-4130 | 15.1% | 1.1% | PEG-4294 | 2.4% | 0.9% |
| PEG-0240 | 3.3% | 0.4% | PEG-1209 | 12.5% | 0.9% | PEG-4131 | 20.4% | 0.5% | PEG-0745 | 6.1% | 0.8% |
| PEG-0241 | 2.3% | 0.3% | PEG-1210 | 11.3% | 0.8% | PEG-4132 | 33.6% | 1.4% | PEG-4296 | 7.7% | 1.3% |
| PEG-0242 | 3.4% | 0.3% | PEG-1211 | 6.6% | 0.3% | PEG-4133 | 23.0% | 0.9% | PEG-4007 | 7.9% | 1.2% |
| PEG-0245 | 4.7% | 0.3% | PEG-1212 | 5.6% | 0.4% | PEG-4134 | 16.3% | 0.9% | PEG-4298 | 8.1% | 1.2% |
| PEG-0246 | 4.5% | 0.6% | PEG-1213 | 15.0% | 1.1% | PEG-4135 | 17.6% | 0.8% | PEG-4299 | 4.3% | 0.9% |
| PEG-0247 | 2.2% | 0.3% | PEG-1214 | 7.4% | 0.4% | PEG-4136 | 18.1% | 1.1% | PEG-4300 | 3.0% | 0.4% |
| PEG-0248 | 3.0% | 0.4% | PEG-1215 | 14.0% | 0.9% | PEG-4137 | 23.7% | 0.9% | PEG-4301 | 1.8% | 0.7% |
| PEG-0249 | 4.8% | 0.4% | PEG-1216 | 4.1% | 0.3% | PEG-4138 | 25.6% | 0.6% | PEG-4302 | 2.2% | 0.5% |
| PEG-0250 | 1.3% | 0.3% | PEG-1217 | 6.4% | 0.3% | PEG-4139 | 13.4% | 0.6% | PEG-4303 | 3.1% | 0.7% |
| PEG-0251 | 3.5% | 0.4% | PEG-1218 | 8.7% | 0.5% | PEG-4140 | 12.3% | 0.6% | PEG-4304 | 3.5% | 0.6% |
| PEG-0254 | 1.5% | 0.3% | PEG-1219 | 4.0% | 0.3% | PEG-4141 | 10.9% | 0.9% | PEG-4305 | 7.6% | 1.2% |
| PEG-0255 | 1.4% | 0.2% | PEG-1224 | 20.9% | 0.8% | PEG-4142 | 22.3% | 1.0% | PEG-0738 | 7.9% | 1.1% |
| PEG-0256 | 1.3% | 0.1% | PEG-1225 | 13.3% | 0.7% | PEG-4143 | 19.4% | 0.8% | PEG-4307 | 7.2% | 1.4% |
| PEG-0257 | 1.1% | 0.2% | PEG-1226 | 6.7% | 0.4% | PEG-4144 | 15.5% | 0.5% | PEG-4308 | 4.9% | 0.5% |
| PEG-0258 | 2.3% | 0.3% | PEG-1227 | 10.3% | 0.5% | PEG-4145 | 14.6% | 0.7% | PEG-4309 | 3.4% | 0.8% |
| PEG-0259 | 2.5% | 0.3% | PEG-1228 | 16.7% | 1.0% | PEG-4146 | 6.9% | 0.5% | PEG-0742 | 2.2% | 0.6% |
| PEG-0260 | 3.5% | 0.3% | PEG-1229 | 9.9% | 0.5% | PEG-4147 | 18.5% | 0.6% | PEG-4311 | 2.0% | 0.4% |
| PEG-0263 | 2.8% | 0.4% | PEG-1230 | 2.8% | 0.3% | PEG-4148 | 18.0% | 0.5% | PEG-4312 | 2.4% | 0.3% |
| PEG-0264 | 3.2% | 0.4% | PEG-1231 | 6.6% | 0.7% | PEG-4149 | 15.1% | 0.4% | PEG-0746 | 3.0% | 0.5% |
| PEG-0265 | 1.6% | 0.2% | PEG-1232 | 12.0% | 0.9% | PEG-4150 | 6.8% | 0.4% | PEG-4314 | 7.0% | 1.2% |
| PEG-0267 | 1.3% | 0.3% | PEG-1233 | 4.8% | 0.3% | PEG-4151 | 34.1% | 1.5% | PEG-4315 | 7.7% | 0.9% |
| PEG-0268 | 2.1% | 0.4% | PEG-1234 | 2.3% | 0.2% | PEG-4152 | 29.4% | 1.4% | PEG-4316 | 7.7% | 1.1% |
| PEG-0269 | 3.8% | 0.3% | PEG-1235 | 7.0% | 0.4% | PEG-4153 | 6.9% | 0.9% | PEG-4317 | 5.8% | 1.0% |
| PEG-0272 | 1.9% | 0.2% | PEG-1236 | 7.8% | 0.7% | PEG-4154 | 10.3% | 0.4% | PEG-4318 | 3.8% | 0.6% |
| PEG-0273 | 3.6% | 0.4% | PEG-1237 | 7.4% | 0.5% | PEG-4155 | 43.2% | 2.6% | PEG-4319 | 1.6% | 0.3% |
| PEG-0274 | 2.7% | 0.3% | PEG-1238 | 3.2% | 0.4% | PEG-4156 | 25.1% | 1.9% | PEG-4320 | 0.9% | 0.4% |
| PEG-0275 | 1.7% | 0.3% | PEG-1239 | 1.4% | 0.2% | PEG-4157 | 25.1% | 2.0% | PEG-4321 | 1.3% | 0.4% |
| PEG-0276 | 1.3% | 0.3% | PEG-1244 | 7.9% | 1.1% | PEG-4158 | 21.6% | 1.0% | PEG-4322 | 2.3% | 0.6% |
| PEG-0277 | 2.0% | 0.2% | PEG-1245 | 10.3% | 0.8% | PEG-4159 | 17.0% | 1.1% | PEG-4323 | 3.8% | 1.4% |
| PEG-0278 | 4.3% | 0.5% | PEG-1246 | 8.9% | 0.8% | PEG-4160 | 22.1% | 0.7% | PEG-0739 | 3.5% | 0.8% |
| PEG-0281 | 7.6% | 0.8% | PEG-1247 | 5.9% | 0.6% | PEG-4161 | 26.8% | 1.9% | PEG-4325 | 4.2% | 0.8% |
| PEG-0282 | 6.8% | 0.6% | PEG-1248 | 3.5% | 0.6% | PEG-4162 | 23.4% | 1.3% | PEG-4326 | 3.0% | 0.5% |
| PEG-0283 | 11.5% | 0.9% | PEG-1249 | 10.5% | 0.4% | PEG-4163 | 1.3% | 0.3% | PEG-4327 | 1.8% | 0.5% |
| PEG-0284 | 4.0% | 0.3% | PEG-1250 | 10.0% | 0.4% | PEG-4164 | 4.8% | 0.4% | PEG-0743 | 2.4% | 0.7% |
| PEG-0285 | 4.8% | 0.4% | PEG-1251 | 4.4% | 0.5% | PEG-4165 | 31.1% | 1.6% | PEG-4329 | 9.6% | |
| PEG-0286 | 3.3% | 0.3% | PEG-1252 | 3.6% | 0.3% | PEG-4166 | 21.3% | 1.5% | PEG-4330 | 10.6% | |
| PEG-0287 | 6.9% | 0.9% | PEG-1253 | 8.5% | 0.7% | PEG-4167 | 21.1% | 0.8% | PEG-0747 | 8.7% | |
| PEG-0290 | 14.3% | 0.6% | PEG-1254 | 9.9% | 0.8% | PEG-4168 | 18.5% | 1.2% | PEG-4332 | 10.8% | |
| PEG-0291 | 13.2% | 0.7% | PEG-1255 | 2.9% | 0.4% | PEG-4169 | 11.7% | 0.6% | PEG-4333 | 10.1% | |
| PEG-0292 | 20.1% | 1.0% | PEG-1256 | 3.1% | 0.4% | PEG-4170 | 17.6% | 0.5% | PEG-4334 | 14.2% | |
| PEG-0293 | 7.3% | 0.7% | PEG-1257 | 10.1% | 0.7% | PEG-4171 | 21.7% | 1.2% | PEG-4335 | 9.7% | |
| PEG-0294 | 6.0% | 0.5% | PEG-1258 | 3.7% | 0.6% | PEG-4172 | 16.2% | 0.6% | PEG-4336 | 9.2% | |
| PEG-0295 | 5.6% | 0.4% | PEG-1259 | 1.6% | 0.5% | PEG-4173 | 6.9% | 0.4% | PEG-4337 | 8.7% | |
| PEG-0296 | 9.7% | 0.6% | PEG-4005 | 24.1% | 0.9% | PEG-4174 | 14.2% | 0.7% | PEG-4338 | 10.7% | |
| PEG-0621 | 25.0% | 0.8% | PEG-4006 | 43.2% | 2.5% | PEG-4175 | 13.7% | 0.7% | PEG-4339 | 8.1% | |
| PEG-0622 | 33.8% | 1.0% | PEG-4011 | 18.7% | 0.5% | PEG-4176 | 12.9% | 0.6% | PEG-4340 | 12.8% | |
| PEG-0623 | 18.0% | 0.4% | PEG-4012 | 13.1% | 0.9% | PEG-4177 | 12.9% | 0.8% | PEG-4341 | 13.6% | |
| PEG-0624 | 12.4% | 0.4% | PEG-4013 | 18.1% | 0.4% | PEG-4178 | 9.9% | 0.4% | PEG-0740 | 15.5% | |
| PEG-0625 | 15.0% | 1.2% | PEG-4014 | 14.7% | 0.6% | PEG-4179 | 4.9% | 0.4% | PEG-4343 | 15.5% | |
| PEG-0626 | 23.5% | 1.3% | PEG-4015 | 11.3% | 0.6% | PEG-4180 | 14.3% | 0.7% | PEG-4344 | 14.1% | |
| PEG-0627 | 6.3% | 0.3% | PEG-4016 | 11.2% | 0.7% | PEG-4181 | 17.5% | 0.8% | PEG-4345 | 11.0% | |
| PEG-0628 | 3.5% | 0.2% | PEG-4017 | 9.0% | 0.7% | PEG-4182 | 10.5% | 0.6% | PEG-0744 | 13.5% | |
| PEG-0645 | 54.2% | 1.9% | PEG-4018 | 8.6% | 0.6% | PEG-4183 | 14.6% | 0.8% | PEG-4347 | 11.4% | |
| PEG-0646 | 38.2% | 1.1% | PEG-4019 | 9.1% | 0.6% | PEG-4184 | 15.9% | 0.6% | PEG-4348 | 14.6% | |
| PEG-0647 | 24.4% | 1.2% | PEG-4020 | 7.9% | 0.5% | PEG-4185 | 21.6% | 0.6% | PEG-0748 | 9.2% | |
| PEG-0648 | 30.7% | 0.9% | PEG-4021 | 7.5% | 0.3% | PEG-4186 | 12.3% | 0.7% | PEG-4350 | 13.5% | |
| PEG-0649 | 32.6% | 4.1% | PEG-4022 | 3.6% | 0.4% | PEG-4187 | 7.5% | 0.5% | PEG-0753 | 11.8% | |
| PEG-0650 | 20.3% | 1.1% | PEG-4023 | 10.6% | 0.4% | PEG-4188 | 12.7% | 0.3% | PEG-4352 | 11.2% | |
| PEG-0651 | 11.1% | 0.6% | PEG-4025 | 4.3% | 0.4% | PEG-4189 | 23.7% | 0.4% | PEG-4353 | 11.4% | |
| PEG-0652 | 16.1% | 0.9% | PEG-4026 | 7.0% | 0.5% | PEG-4190 | 19.9% | 0.8% | PEG-4354 | 11.3% | |
| PEG-0669 | 29.4% | 1.4% | PEG-4027 | 8.1% | 0.8% | PEG-4191 | 11.2% | 0.7% | PEG-0757 | 10.6% | |
| PEG-0670 | 21.3% | 0.5% | PEG-4028 | 7.2% | 0.3% | PEG-4192 | 11.5% | 0.6% | PEG-4356 | 14.9% | |
| PEG-0671 | 29.6% | 1.2% | PEG-4029 | 4.0% | 0.3% | PEG-4193 | 9.8% | 0.8% | PEG-4357 | 13.6% | |
| PEG-0672 | 21.2% | 0.6% | PEG-4030 | 2.3% | 0.2% | PEG-4194 | 18.5% | 0.6% | PEG-0761 | 11.9% | |
| PEG-0673 | 19.0% | 1.1% | PEG-4031 | 3.7% | 0.3% | PEG-4195 | 21.5% | 1.0% | PEG-4359 | 13.9% | |
| PEG-0674 | 18.2% | 0.6% | PEG-4032 | 2.9% | 0.4% | PEG-4196 | 16.9% | 0.6% | PEG-4360 | 14.7% | |
| PEG-0675 | 22.1% | 1.0% | PEG-4033 | 3.3% | 0.1% | PEG-4197 | 14.5% | 0.6% | PEG-4361 | 11.2% | |
| PEG-0676 | 15.0% | 0.6% | PEG-4034 | 1.7% | 0.2% | PEG-4198 | 20.3% | 0.9% | PEG-4362 | 10.1% | |
| PEG-0800 | 19.2% | 2.3% | PEG-4035 | 3.2% | 0.2% | PEG-4199 | 22.9% | 1.1% | PEG-4363 | 10.5% | |
| PEG-0801 | 24.2% | 2.7% | PEG-4036 | 11.2% | 0.7% | PEG-4200 | 8.9% | 0.4% | PEG-4364 | 11.6% | |
| PEG-0802 | 21.0% | 6.5% | PEG-4037 | 10.2% | 0.3% | PEG-4201 | 9.9% | 0.4% | PEG-4365 | 9.3% | |
| PEG-0803 | 23.9% | 2.7% | PEG-4038 | 8.3% | 0.4% | PEG-4202 | 7.0% | 0.4% | PEG-4366 | 7.9% | |
| PEG-0804 | 21.3% | 3.0% | PEG-4039 | 4.5% | 0.4% | PEG-4203 | 13.6% | 0.5% | PEG-4367 | 12.6% | |
| PEG-0805 | 16.1% | 1.7% | PEG-4040 | 3.4% | 0.3% | PEG-4204 | 13.4% | 0.8% | PEG-4368 | 8.2% | |
| PEG-0806 | 12.4% | 1.3% | PEG-4041 | 3.2% | 0.3% | PEG-4205 | 8.0% | 0.4% | PEG-0754 | 4.0% | |
| PEG-0809 | 23.2% | 2.6% | PEG-4042 | 3.4% | 0.2% | PEG-4206 | 4.0% | 0.3% | PEG-4370 | 3.7% | |
| PEG-0810 | 20.5% | 4.6% | PEG-4043 | 9.4% | 0.7% | PEG-4207 | 6.7% | 0.4% | PEG-4371 | 2.1% | |
| PEG-0811 | 25.4% | 5.7% | PEG-4044 | 4.6% | 0.5% | PEG-4208 | 12.3% | 0.4% | PEG-4372 | 1.6% | |
| PEG-0812 | 20.4% | 2.3% | PEG-4045 | 2.1% | 0.4% | PEG-4209 | 9.7% | 0.4% | PEG-0758 | 1.6% | |
| PEG-0813 | 25.0% | 3.1% | PEG-4046 | 6.6% | 0.5% | PEG-4210 | 7.6% | 0.3% | PEG-4374 | 1.6% | |
| PEG-0814 | 13.2% | 1.3% | PEG-4047 | 2.2% | 0.3% | PEG-4211 | 4.8% | 0.4% | PEG-4375 | 1.6% | |
| PEG-0815 | 13.0% | 1.4% | PEG-4048 | 3.0% | 0.4% | PEG-4212 | 2.0% | 0.2% | PEG-0762 | 3.5% | |
| PEG-0818 | 23.2% | 2.0% | PEG-4049 | 4.2% | 0.7% | PEG-4213 | 9.5% | 0.3% | PEG-4377 | 4.8% | |
| PEG-0819 | 27.1% | 4.1% | PEG-4050 | 6.5% | 0.4% | PEG-4214 | 10.9% | 0.3% | PEG-4378 | 4.3% | |
| PEG-0820 | 26.0% | 2.7% | PEG-4051 | 6.2% | 0.5% | PEG-4215 | 6.6% | 0.4% | PEG-4379 | 4.4% | |
| PEG-0821 | 23.9% | 1.5% | PEG-4052 | 8.4% | 0.6% | PEG-4216 | 1.9% | 0.2% | PEG-4380 | 2.6% | |
| PEG-0822 | 23.3% | 2.2% | PEG-4053 | 8.2% | 0.6% | PEG-4217 | 2.8% | 0.3% | PEG-4381 | 3.1% | |
| PEG-0823 | 13.5% | 1.0% | PEG-4054 | 9.4% | 0.7% | PEG-4218 | 5.0% | 0.5% | PEG-4382 | 2.7% | |
| PEG-0824 | 15.5% | 1.7% | PEG-4055 | 6.7% | 0.5% | PEG-4219 | 1.3% | 0.2% | PEG-4383 | 1.9% | |
| PEG-0827 | 17.9% | 2.4% | PEG-4056 | 9.3% | 0.8% | PEG-4220 | 1.6% | 0.2% | PEG-4384 | 3.7% | |
| PEG-0828 | 28.0% | 3.0% | PEG-4057 | 9.2% | 0.7% | PEG-4221 | 3.0% | 0.3% | PEG-4385 | 4.3% | |
| PEG-0829 | 22.8% | 2.5% | PEG-4058 | 7.3% | 0.4% | PEG-4222 | 1.9% | 0.2% | PEG-4386 | 3.4% | |
| PEG-0830 | 26.1% | 1.7% | PEG-4059 | 6.3% | 0.7% | PEG-4223 | 3.5% | 0.3% | PEG-0755 | 3.5% | |
| PEG-0831 | 21.3% | 2.2% | PEG-4060 | 5.9% | 0.5% | PEG-4224 | 2.1% | 0.4% | PEG-4388 | 2.4% | |
| PEG-0832 | 17.1% | 1.3% | PEG-4061 | 8.8% | 0.3% | PEG-0769 | 2.7% | 0.4% | PEG-4389 | 2.5% | |
| PEG-0833 | 11.9% | 1.3% | PEG-4062 | 6.6% | 0.7% | PEG-4226 | 2.5% | 0.5% | PEG-4390 | 2.1% | |
| PEG-0836 | 15.4% | 1.8% | PEG-4063 | 5.9% | 0.8% | PEG-4227 | 1.9% | 0.5% | PEG-0759 | 2.7% | |
| PEG-0837 | 24.8% | 3.3% | PEG-4064 | 8.3% | 0.4% | PEG-4228 | 1.0% | 0.2% | PEG-4392 | 1.7% | |
| PEG-0838 | 18.1% | 2.1% | PEG-4065 | 3.0% | 0.4% | PEG-0773 | 0.7% | 0.2% | PEG-4393 | 2.1% | |
| PEG-0839 | 26.1% | 2.7% | PEG-4066 | 10.5% | 0.8% | PEG-4230 | 1.0% | 0.3% | PEG-0763 | 2.2% | |
| PEG-0840 | 15.5% | 1.9% | PEG-4067 | 12.1% | 1.0% | PEG-4231 | 1.4% | 0.4% | PEG-4395 | 3.3% | |
| PEG-0841 | 14.9% | 1.5% | PEG-4068 | 6.9% | 0.4% | PEG-0777 | 2.8% | 0.5% | PEG-4396 | 3.1% | |
| PEG-0842 | 9.9% | 0.9% | PEG-4069 | 5.8% | 0.6% | PEG-4233 | 1.5% | 0.4% | PEG-4397 | 2.9% | |
| PEG-0845 | 14.7% | 1.4% | PEG-4070 | 6.7% | 0.4% | PEG-4234 | 1.6% | 0.3% | PEG-4398 | 2.3% | |
| PEG-0846 | 16.1% | 2.4% | PEG-4071 | 7.0% | 0.2% | PEG-4235 | 1.8% | 0.4% | PEG-4399 | 1.0% | |
| PEG-0847 | 20.6% | 1.8% | PEG-4072 | 5.9% | 0.4% | PEG-4236 | 1.4% | 0.3% | PEG-4400 | 0.9% | |
| PEG-0848 | 18.2% | 2.7% | PEG-4073 | 4.5% | 0.3% | PEG-4237 | 0.9% | 0.4% | PEG-4401 | 1.1% | |
| PEG-0849 | 14.7% | 1.9% | PEG-4074 | 2.4% | 0.3% | PEG-4238 | 0.7% | 0.1% | PEG-4402 | 1.4% | |
| PEG-0850 | 9.9% | 1.0% | PEG-4075 | 2.1% | 0.3% | PEG-4239 | 0.6% | 0.3% | PEG-4403 | 1.7% | |
| PEG-0851 | 9.8% | 1.3% | PEG-4076 | 5.1% | 0.6% | PEG-4240 | 0.7% | 0.3% | PEG-4404 | 1.1% | |
| PEG-0944 | 15.2% | 0.8% | PEG-4077 | 2.7% | 0.5% | PEG-4241 | 1.4% | 0.3% | PEG-0756 | 1.1% | |
| PEG-0945 | 8.7% | 0.6% | PEG-4078 | 2.7% | 0.3% | PEG-4242 | 1.0% | 0.4% | PEG-4406 | 1.5% | |
| PEG-0946 | 13.5% | 0.2% | PEG-4079 | 5.3% | 0.5% | PEG-0770 | 1.0% | 0.3% | PEG-4407 | 1.2% | |
| PEG-0947 | 9.8% | 0.6% | PEG-4080 | 2.8% | 0.6% | PEG-4244 | 1.3% | 0.4% | PEG-4408 | 1.2% | |
| PEG-0948 | 11.7% | 0.7% | PEG-4081 | 5.1% | 0.2% | PEG-4245 | 1.5% | 0.3% | PEG-0760 | 0.7% | |
| PEG-0949 | 10.5% | 0.7% | PEG-4082 | 7.3% | 0.8% | PEG-4246 | 0.1% | 0.2% | PEG-4410 | 0.9% | |
| PEG-0950 | 5.5% | 0.4% | PEG-4083 | 5.2% | 0.6% | PEG-0774 | 0.2% | 0.2% | PEG-4411 | 1.2% | |
| PEG-0953 | 16.0% | 0.6% | PEG-4084 | 14.8% | 0.7% | PEG-4248 | 0.1% | 0.2% | PEG-0764 | 1.3% | |

TABLE 18h
Correction of G339C using PE3 systems, experiment 1.

| PEG# | ng # | edit % | indel % | PEG# | ng # | edit % | indel % | PEG# | ng # | edit % | indel % |
|---|---|---|---|---|---|---|---|---|---|---|---|
| PEG-0829 | 370 | 30% | 1% | PEG-0829 | 357 | 35% | 6% | PEG-0625 | 5015 | 13% | 6% |
| PEG-0962 | 370 | 27% | 3% | PEG-0838 | 357 | 28% | 5% | PEG-0754 | 5015 | 13% | 1% |
| PEG-1208 | 370 | 26% | 1% | PEG-1208 | 357 | 26% | 11% | PEG-0649 | 5015 | 10% | 6% |
| PEG-1228 | 370 | 19% | 1% | PEG-0962 | 357 | 23% | 8% | PEG-0673 | 5015 | 8% | 5% |
| PEG-1248 | 370 | 19% | 1% | PEG-1228 | 357 | 21% | 12% | PEG-0649 | 5014 | 30% | 1% |
| PEG-0838 | 370 | 17% | 1% | PEG-1248 | 357 | 19% | 9% | PEG-0625 | 5014 | 25% | 1% |
| PEG-0649 | 338 | 51% | 4% | PEG-0838 | 356 | 33% | 8% | PEG-0738 | 5014 | 23% | 1% |
| PEG-0625 | 338 | 41% | 5% | PEG-0829 | 356 | 32% | 4% | PEG-0065 | 5014 | 17% | 1% |
| PEG-0065 | 338 | 30% | 5% | PEG-1208 | 356 | 32% | 1% | PEG-0673 | 5014 | 17% | 1% |
| PEG-0673 | 338 | 29% | 3% | PEG-0962 | 356 | 31% | 2% | PEG-0754 | 5014 | 11% | 1% |
| PEG-0738 | 338 | 29% | 2% | PEG-1228 | 356 | 30% | 2% | PEG-0649 | 333 | 45% | 4% |
| PEG-0754 | 338 | 8% | 1% | PEG-1248 | 356 | 21% | 2% | PEG-0625 | 333 | 31% | 3% |
| PEG-0649 | 5003 | 45% | 3% | PEG-0838 | 355 | 32% | 4% | PEG-0065 | 333 | 29% | 5% |
| PEG-0625 | 5003 | 37% | 4% | PEG-0829 | 355 | 30% | 3% | PEG-0673 | 333 | 25% | 3% |
| PEG-0738 | 5003 | 31% | 2% | PEG-0962 | 355 | 27% | 2% | PEG-0738 | 333 | 16% | 2% |
| PEG-0673 | 5003 | 29% | 2% | PEG-1228 | 355 | 25% | 2% | PEG-0754 | 333 | 7% | 1% |
| PEG-0065 | 5003 | 27% | 3% | PEG-1208 | 355 | 24% | 2% | PEG-0649 | 5013 | 33% | 2% |
| PEG-0754 | 5003 | 10% | 1% | PEG-1248 | 355 | 16% | 1% | PEG-0065 | 5013 | 26% | 1% |
| PEG-0649 | 5002 | 45% | 3% | PEG-0838 | 354 | 37% | 5% | PEG-0625 | 5013 | 26% | 1% |
| PEG-0625 | 5002 | 35% | 3% | PEG-0829 | 354 | 36% | 2% | PEG-0673 | 5013 | 25% | 1% |
| PEG-0673 | 5002 | 27% | 3% | PEG-0962 | 354 | 27% | 2% | PEG-0738 | 5013 | 25% | 2% |
| PEG-0738 | 5002 | 27% | 2% | PEG-1228 | 354 | 26% | 1% | PEG-0754 | 5013 | 17% | 1% |
| PEG-0065 | 5002 | 24% | 2% | PEG-1208 | 354 | 25% | 1% | PEG-1248 | 364 | 29% | 2% |
| PEG-0754 | 5002 | 11% | 1% | PEG-1248 | 354 | 18% | 1% | PEG-0962 | 364 | 27% | 1% |
| PEG-0649 | 5001 | 45% | 3% | PEG-0838 | 353 | 35% | 9% | PEG-1208 | 364 | 25% | 1% |
| PEG-0625 | 5001 | 34% | 3% | PEG-0829 | 353 | 34% | 2% | PEG-1228 | 364 | 24% | 2% |
| PEG-0065 | 5001 | 30% | 1% | PEG-1208 | 353 | 27% | 1% | PEG-0829 | 364 | 20% | 2% |
| PEG-0738 | 5001 | 27% | 1% | PEG-0962 | 353 | 26% | 1% | PEG-0838 | 364 | 12% | 2% |
| PEG-0673 | 5001 | 26% | 2% | PEG-1228 | 353 | 25% | 1% | PEG-1208 | 361 | 25% | 6% |
| PEG-0754 | 5001 | 9% | 1% | PEG-1248 | 353 | 17% | 1% | PEG-0962 | 361 | 24% | 7% |
| PEG-1208 | 363 | 27% | 2% | PEG-0829 | 352 | 34% | 2% | PEG-1228 | 361 | 23% | 7% |
| PEG-0962 | 363 | 23% | 3% | PEG-1228 | 352 | 26% | 2% | PEG-0829 | 361 | 22% | 10% |
| PEG-1248 | 363 | 22% | 3% | PEG-1208 | 352 | 25% | 2% | PEG-1248 | 361 | 21% | 6% |
| PEG-1228 | 363 | 21% | 3% | PEG-0838 | 352 | 24% | 2% | PEG-0838 | 361 | 19% | 7% |
| PEG-0829 | 363 | 20% | 9% | PEG-0962 | 352 | 22% | 1% | PEG-1248 | 359 | 25% | 13% |
| PEG-0838 | 363 | 17% | 7% | PEG-1248 | 352 | 16% | 1% | PEG-1228 | 359 | 24% | 12% |
| PEG-0625 | 340 | 40% | 5% | PEG-0649 | 336 | 42% | 3% | PEG-0829 | 359 | 23% | 6% |
| PEG-0649 | 340 | 35% | 3% | PEG-0065 | 336 | 31% | 4% | PEG-0962 | 359 | 22% | 9% |
| PEG-0065 | 340 | 24% | 5% | PEG-0625 | 336 | 30% | 2% | PEG-1208 | 359 | 19% | 6% |
| PEG-0673 | 340 | 22% | 2% | PEG-0673 | 336 | 22% | 2% | PEG-0838 | 359 | 18% | 4% |
| PEG-0738 | 340 | 19% | 2% | PEG-0738 | 336 | 14% | 1% | PEG-1208 | 369 | 29% | 2% |
| PEG-0754 | 340 | 15% | 2% | PEG-0754 | 336 | 4% | 1% | PEG-0962 | 369 | 27% | 3% |
| PEG-1208 | 362 | 28% | 3% | PEG-0625 | 344 | 34% | 6% | PEG-1228 | 369 | 27% | 2% |
| PEG-0962 | 362 | 26% | 1% | PEG-0649 | 344 | 34% | 6% | PEG-1248 | 369 | 20% | 2% |
| PEG-0829 | 362 | 25% | 11% | PEG-0738 | 344 | 26% | 2% | PEG-0829 | 369 | 9% | 4% |
| PEG-1228 | 362 | 25% | 4% | PEG-0673 | 344 | 23% | 6% | PEG-0838 | 369 | 4% | 4% |
| PEG-1248 | 362 | 25% | 4% | PEG-0065 | 344 | 20% | 6% | PEG-0829 | 350 | 31% | 7% |
| PEG-0838 | 362 | 18% | 8% | PEG-0754 | 344 | 17% | 1% | PEG-0838 | 350 | 27% | 5% |
| PEG-0962 | 360 | 25% | 6% | PEG-0649 | 345 | 37% | 5% | PEG-1208 | 350 | 19% | 2% |
| PEG-1248 | 360 | 22% | 5% | PEG-0625 | 345 | 33% | 6% | PEG-1228 | 350 | 15% | 2% |
| PEG-0829 | 360 | 21% | 9% | PEG-0738 | 345 | 33% | 2% | PEG-0962 | 350 | 13% | 2% |
| PEG-1208 | 360 | 21% | 5% | PEG-0673 | 345 | 21% | 5% | PEG-1248 | 350 | 12% | 1% |
| PEG-1228 | 360 | 19% | 7% | PEG-0754 | 345 | 17% | 1% | PEG-0649 | 339 | 47% | 5% |
| PEG-0838 | 360 | 16% | 10% | PEG-0065 | 345 | 15% | 5% | PEG-0673 | 339 | 34% | 5% |
| PEG-0649 | 337 | 43% | 3% | PEG-0829 | 351 | 26% | 2% | PEG-0625 | 339 | 32% | 3% |
| PEG-0625 | 337 | 31% | 3% | PEG-0838 | 351 | 25% | 3% | PEG-0738 | 339 | 30% | 6% |
| PEG-0065 | 337 | 28% | 1% | PEG-1208 | 351 | 16% | 6% | PEG-0065 | 339 | 24% | 4% |
| PEG-0673 | 337 | 24% | 1% | PEG-1228 | 351 | 13% | 5% | PEG-0754 | 339 | 13% | 5% |
| PEG-0738 | 337 | 21% | 2% | PEG-0962 | 351 | 11% | 7% | PEG-0649 | 341 | 46% | 4% |
| PEG-0754 | 337 | 8% | 1% | PEG-1248 | 351 | 8% | 2% | PEG-0065 | 341 | 33% | 6% |
| PEG-0829 | 358 | 27% | 4% | PEG-0829 | 349 | 30% | 3% | PEG-0625 | 341 | 30% | 3% |
| PEG-0838 | 358 | 25% | 5% | PEG-0838 | 349 | 30% | 4% | PEG-0673 | 341 | 29% | 4% |
| PEG-1208 | 358 | 23% | 10% | PEG-0962 | 349 | 11% | 3% | PEG-0738 | 341 | 26% | 4% |
| PEG-1228 | 358 | 21% | 13% | PEG-1208 | 349 | 9% | 3% | PEG-0754 | 341 | 11% | 2% |
| PEG-1248 | 358 | 20° | 11% | PEG-1228 | 349 | 9% | 3% | PEG-0649 | 342 | 31% | 7% |
| PEG-0962 | 358 | 19% | 9% | PEG-1248 | 349 | 8% | 3% | PEG-0625 | 342 | 25% | 6% |
| PEG-0829 | 365 | 30% | 5% | PEG-0649 | 335 | 25% | 2% | PEG-0065 | 342 | 22% | 8% |
| PEG-1248 | 365 | 29% | 3% | PEG-0065 | 335 | 23% | 2% | PEG-0738 | 342 | 17% | 2% |
| PEG-0962 | 365 | 28% | 2% | PEG-0673 | 335 | 22% | 1% | PEG-0673 | 342 | 14% | 6% |
| PEG-1208 | 365 | 28% | 3% | PEG-0625 | 335 | 20% | 1% | PEG-0754 | 342 | 11% | 1% |
| PEG-1228 | 365 | 24% | 3% | PEG-0738 | 335 | 18% | 1% | PEG-0738 | 346 | 31% | 2% |
| PEG-0838 | 365 | 12% | 1% | PEG-0754 | 335 | 9% | 1% | PEG-0649 | 346 | 30% | 2% |
| PEG-0962 | 366 | 28% | 1% | PEG-0738 | 347 | 31% | 2% | PEG-0625 | 346 | 26% | 2% |
| PEG-1208 | 366 | 27% | 2% | PEG-0649 | 347 | 27% | 3% | PEG-0065 | 346 | 19% | 2% |
| PEG-1248 | 366 | 24% | 2% | PEG-0625 | 347 | 20% | 3% | PEG-0673 | 346 | 18% | 1% |
| PEG-0829 | 366 | 23% | 2% | PEG-0673 | 347 | 15% | 3% | PEG-0754 | 346 | 15% | 1% |
| PEG-1228 | 366 | 23% | 3% | PEG-0754 | 347 | 14% | 1% | PEG-0649 | 334 | 34% | 2% |
| PEG-0838 | 366 | 9% | 3% | PEG-0065 | 347 | 12% | 3% | PEG-0625 | 334 | 24% | 2% |
| PEG-0625 | 343 | 36% | 6% | PEG-0738 | 5017 | 34% | 3% | PEG-0738 | 334 | 24% | 4% |
| PEG-0649 | 343 | 33% | 7% | PEG-0649 | 5017 | 23% | 3% | PEG-0065 | 334 | 22% | 3% |
| PEG-0738 | 343 | 24° | 3% | PEG-0673 | 5017 | 22% | 2% | PEG-0673 | 334 | 20% | 2% |
| PEG-0065 | 343 | 18% | 6% | PEG-0065 | 5017 | 16% | 2% | PEG-0754 | 334 | 7% | 3% |
| PEG-0673 | 343 | 17% | 5% | PEG-0754 | 5017 | 16% | 1% | PEG-0649 | none | 43% | 3% |
| PEG-0754 | 343 | 14% | 2% | PEG-0625 | 5017 | 14% | 3% | PEG-0829 | none | 37% | 1% |
| PEG-0962 | 367 | 37% | 3% | PEG-0829 | 348 | 28% | 3% | PEG-0962 | none | 31% | 2% |
| PEG-1208 | 367 | 27% | 2% | PEG-0838 | 348 | 18% | 2% | PEG-1248 | none | 28% | 3% |
| PEG-1228 | 367 | 25% | 3% | PEG-1208 | 348 | 8% | 2% | PEG-0065 | none | 27% | 2% |
| PEG-1248 | 367 | 24% | 2% | PEG-1248 | 348 | 7% | 1% | PEG-0625 | none | 27% | 2% |
| PEG-0829 | 367 | 22% | 2% | PEG-1228 | 348 | 6% | 1% | PEG-1208 | none | 24% | 3% |
| PEG-0838 | 367 | 9% | 2% | PEG-0962 | 348 | 5% | 1% | PEG-0673 | none | 21% | 1% |
| PEG-1208 | 368 | 30% | 3% | PEG-0738 | 5016 | 36% | 3% | PEG-0838 | none | 21% | 0% |
| PEG-0962 | 368 | 29% | 2% | PEG-0649 | 5016 | 35% | 4% | PEG-1228 | none | 19% | 3% |
| PEG-1248 | 368 | 28% | 3% | PEG-0625 | 5016 | 23% | 3% | PEG-0738 | none | 18% | 1% |
| PEG-1228 | 368 | 23% | 3% | PEG-0673 | 5016 | 21% | 4% | PEG-0754 | none | 5% | 1% |
| PEG-0829 | 368 | 19% | 1% | PEG-0754 | 5016 | 16% | 1% | | | | |
| PEG-0838 | 368 | 12% | 2% | PEG-0738 | 5015 | 31% | 2% | | | | |

TABLE 18i
Correction of G339C using PE3 systems, experiment 2.

| PEG# | ng # | edit % | Indel % | PEG# | ng # | edit % | indel % | PEG# | ng # | edit % | indel % |
|---|---|---|---|---|---|---|---|---|---|---|---|
| PEG-0065 | 333 | 5% | 8% | PEG-1208 | 352 | 25% | 1% | PEG-0065 | 5001 | 22% | 1% |
| PEG-0625 | 333 | 8% | 8% | PEG-1228 | 352 | 28% | 1% | PEG-0625 | 5001 | 27% | 1% |
| PEG-0649 | 333 | 8% | 8% | PEG-1248 | 352 | 17% | 1% | PEG-0649 | 5001 | 30% | 2% |
| PEG-0673 | 333 | 7% | 6% | PEG-0829 | 353 | 27% | 4% | PEG-0673 | 5001 | 17% | 1% |
| PEG-0738 | 333 | 15% | 6% | PEG-0838 | 353 | 27% | 3% | PEG-0738 | 5001 | 22% | 1% |
| PEG-0754 | 333 | 7% | 4% | PEG-0962 | 353 | 17% | 1% | PEG-0754 | 5001 | 12% | 1% |
| PEG-0065 | 334 | 11% | 7% | PEG-1208 | 353 | 29% | 2% | PEG-0065 | 5002 | 21% | 1% |
| PEG-0625 | 334 | 11% | 7% | PEG-1228 | 353 | 33% | 2% | PEG-0625 | 5002 | 26% | 1% |
| PEG-0649 | 334 | 12% | 10% | PEG-1248 | 353 | 22% | 2% | PEG-0649 | 5002 | 27% | 2% |
| PEG-0673 | 334 | 8% | 5% | PEG-0829 | 354 | 26% | 2% | PEG-0673 | 5002 | 17% | 1% |
| PEG-0738 | 334 | 16% | 5% | PEG-0838 | 354 | 26% | 2% | PEG-0738 | 5002 | 22% | 2% |
| PEG-0754 | 334 | 7% | 4% | PEG-0962 | 354 | 20% | 2% | PEG-0754 | 5002 | 10% | 1% |
| PEG-0065 | 335 | 12% | 6% | PEG-1208 | 354 | 24% | 2% | PEG-0065 | 5003 | 20% | 1% |
| PEG-0625 | 335 | 15% | 7% | PEG-1228 | 354 | 31% | 2% | PEG-0625 | 5003 | 26% | 2% |
| PEG-0649 | 335 | 19% | 9% | PEG-1248 | 354 | 23% | 2% | PEG-0649 | 5003 | 28% | 2% |
| PEG-0673 | 335 | 10% | 5% | PEG-0829 | 355 | 29% | 2% | PEG-0673 | 5003 | 17% | 2% |
| PEG-0738 | 335 | 17% | 4% | PEG-0838 | 355 | 25% | 2% | PEG-0738 | 5003 | 22% | 2% |
| PEG-0754 | 335 | 7% | 3% | PEG-0962 | 355 | 21% | 1% | PEG-0754 | 5003 | 5% | 1% |
| PEG-0065 | 336 | 11% | 10% | PEG-1208 | 355 | 26% | 1% | PEG-0625 | 5013 | 26% | 2% |
| PEG-0625 | 336 | 13% | 15% | PEG-1228 | 355 | 32% | 2% | PEG-0649 | 5013 | 27% | 3% |
| PEG-0649 | 336 | 15% | 17% | PEG-1248 | 355 | 22% | 1% | PEG-0673 | 5013 | 28% | 3% |
| PEG-0673 | 336 | 9% | 10% | PEG-0829 | 356 | 30% | 5% | PEG-0738 | 5013 | 23% | 2% |
| PEG-0738 | 336 | 17% | 9% | PEG-0838 | 356 | 30% | 4% | PEG-0754 | 5013 | 16% | 2% |
| PEG-0754 | 336 | 7% | 6% | PEG-0962 | 356 | 23% | 2% | PEG-0065 | 5014 | 20% | 1% |
| PEG-0065 | 337 | 20% | 3% | PEG-1208 | 356 | 29% | 2% | PEG-0625 | 5014 | 25% | 2% |
| PEG-0625 | 337 | 26% | 3% | PEG-1228 | 356 | 40% | 3% | PEG-0649 | 5014 | 25% | 2% |
| PEG-0649 | 337 | 27% | 4% | PEG-1248 | 356 | 27% | 2% | PEG-0673 | 5014 | 24% | 2% |
| PEG-0673 | 337 | 19% | 2% | PEG-0829 | 357 | 29% | 5% | PEG-0738 | 5014 | 26% | 2% |
| PEG-0738 | 337 | 19% | 2% | PEG-0838 | 357 | 29% | 5% | PEG-0754 | 5014 | 16% | 1% |
| PEG-0754 | 337 | 8% | 1% | PEG-0962 | 357 | 21% | 3% | PEG-0065 | 5015 | 22% | 2% |
| PEG-0065 | 338 | 27% | 2% | PEG-1208 | 357 | 30% | 2% | PEG-0625 | 5015 | 32% | 3% |
| PEG-0625 | 338 | 28% | 2% | PEG-1228 | 357 | 37% | 4% | PEG-0649 | 5015 | 31% | 3% |
| PEG-0649 | 338 | 32% | 3% | PEG-1248 | 357 | 30% | 2% | PEG-0673 | 5015 | 29% | 2% |
| PEG-0673 | 338 | 21% | 1% | PEG-0829 | 358 | 24% | 6% | PEG-0738 | 5015 | 33% | 2% |
| PEG-0738 | 338 | 26% | 2% | PEG-0838 | 358 | 24% | 6% | PEG-0754 | 5015 | 15% | 1% |
| PEG-0754 | 338 | 11% | 1% | PEG-0962 | 358 | 16% | 3% | PEG-0065 | 5016 | 25% | 2% |
| PEG-0065 | 339 | 19% | 11% | PEG-1208 | 358 | 28% | 3% | PEG-0625 | 5016 | 34% | 3% |
| PEG-0625 | 339 | 22% | 16% | PEG-1228 | 358 | 33% | 4% | PEG-0649 | 5016 | 31% | 4% |
| PEG-0649 | 339 | 21% | 18% | PEG-1248 | 358 | 27% | 4% | PEG-0673 | 5016 | 32% | 3% |
| PEG-0673 | 339 | 20% | 12% | PEG-0829 | 359 | 20% | 6% | PEG-0738 | 5016 | 29% | 2% |
| PEG-0738 | 339 | 26% | 6% | PEG-0838 | 359 | 22% | 9% | PEG-0754 | 5016 | 19% | 1% |
| PEG-0754 | 339 | 15% | 5% | PEG-0962 | 359 | 21% | 4% | PEG-0065 | 5017 | 23% | 2% |
| PEG-0065 | 340 | 21% | 16% | PEG-1208 | 359 | 30% | 3% | PEG-0625 | 5017 | 29% | 3% |
| PEG-0625 | 340 | 21% | 15% | PEG-1228 | 359 | 24% | 4% | PEG-0649 | 5017 | 29% | 5% |
| PEG-0649 | 340 | 15% | 15% | PEG-1248 | 359 | 23% | 6% | PEG-0673 | 5017 | 28% | 3% |
| PEG-0673 | 340 | 20% | 13% | PEG-0829 | 360 | 13% | 10% | PEG-0738 | 5017 | 27% | 2% |
| PEG-0738 | 340 | 23% | 4% | PEG-0838 | 360 | 19% | 18% | PEG-0754 | 5017 | 19% | 1% |
| PEG-0754 | 340 | 15% | 4% | PEG-0962 | 360 | 13% | 8% | PEG-0829 | 5030 | 24% | 1% |
| PEG-0065 | 341 | 25% | 14% | PEG-1208 | 360 | 28% | 9% | PEG-0838 | 5030 | 17% | 1% |
| PEG-0625 | 341 | 26% | 12% | PEG-1228 | 360 | 25% | 7% | PEG-0962 | 5030 | 16% | 1% |
| PEG-0649 | 341 | 25% | 16% | PEG-1248 | 360 | 17% | 7% | PEG-1208 | 5030 | 24% | 1% |
| PEG-0673 | 341 | 21% | 11% | PEG-0829 | 361 | 21% | 9% | PEG-1228 | 5030 | 20% | 1% |
| PEG-0738 | 341 | 29% | 4% | PEG-0838 | 361 | 20% | 12% | PEG-1248 | 5030 | 19% | 1% |
| PEG-0754 | 341 | 16% | 3% | PEG-0962 | 361 | 19% | 8% | PEG-0065 | none | 24% | 2% |
| PEG-0065 | 342 | 18% | 5% | PEG-1208 | 361 | 29% | 6% | PEG-0065 | none | 20% | 1% |
| PEG-0625 | 342 | 23% | 7% | PEG-1228 | 361 | 27% | 6% | PEG-0625 | none | 28% | 2% |
| PEG-0649 | 342 | 23% | 8% | PEG-1248 | 361 | 19% | 7% | PEG-0625 | none | 24% | 2% |
| PEG-0673 | 342 | 18% | 5% | PEG-0829 | 362 | 18% | 10% | PEG-0649 | none | 24% | 2% |
| PEG-0738 | 342 | 22% | 3% | PEG-0838 | 362 | 20% | 12% | PEG-0649 | none | 24% | 2% |
| PEG-0754 | 342 | 19% | 2% | PEG-0962 | 362 | 18% | 8% | PEG-0673 | none | 24% | 1% |
| PEG-0065 | 343 | 20% | 5% | PEG-1208 | 362 | 31% | 5% | PEG-0673 | none | 23% | 1% |
| PEG-0625 | 343 | 25% | 7% | PEG-1228 | 362 | 30% | 6% | PEG-0738 | none | 26% | 2% |
| PEG-0649 | 343 | 24% | 8% | PEG-1248 | 362 | 24% | 7% | PEG-0738 | none | 25% | 1% |
| PEG-0673 | 343 | 21% | 5% | PEG-0829 | 363 | 15% | 11% | PEG-0738 | none | 24% | 2% |
| PEG-0738 | 343 | 27% | 2% | PEG-0838 | 363 | 20% | 15% | PEG-0738 | none | 22% | 2% |
| PEG-0754 | 343 | 16% | 2% | PEG-0962 | 363 | 17% | 12% | PEG-0738 | none | 18% | 3% |
| PEG-0065 | 344 | 23% | 3% | PEG-1208 | 363 | 28% | 8% | PEG-0738 | none | 16% | 1% |
| PEG-0625 | 344 | 26% | 3% | PEG-1228 | 363 | 31% | 8% | PEG-0754 | none | 11% | 1% |
| PEG-0649 | 344 | 31% | 4% | PEG-1248 | 363 | 24% | 13% | PEG-0754 | none | 10% | 1% |
| PEG-0673 | 344 | 23% | 3% | PEG-0829 | 364 | 20% | 5% | PEG-0754 | none | 10% | 1% |
| PEG-0738 | 344 | 29% | 2% | PEG-0838 | 364 | 15% | 4% | PEG-0754 | none | 9% | 1% |
| PEG-0754 | 344 | 18% | 2% | PEG-0962 | 364 | 14% | 2% | PEG-0754 | none | 9% | 1% |
| PEG-0065 | 345 | 20% | 2% | PEG-1208 | 364 | 17% | 1% | PEG-0754 | none | 8% | 1% |
| PEG-0625 | 345 | 26% | 2% | PEG-1228 | 364 | 17% | 1% | PEG-0829 | none | 29% | 1% |
| PEG-0649 | 345 | 28% | 4% | PEG-1248 | 364 | 19% | 1% | PEG-0829 | none | 27% | 1% |
| PEG-0673 | 345 | 23% | 2% | PEG-0829 | 365 | 22% | 3% | PEG-0829 | none | 20% | 1% |
| PEG-0738 | 345 | 29% | 2% | PEG-0838 | 365 | 18% | 3% | PEG-0829 | none | 20% | 1% |
| PEG-0754 | 345 | 22% | 1% | PEG-0962 | 365 | 18% | 3% | PEG-0829 | none | 14% | 1% |
| PEG-0065 | 346 | 22% | 2% | PEG-1208 | 365 | 26% | 2% | PEG-0829 | none | 13% | 1% |
| PEG-0625 | 346 | 27% | 2% | PEG-1228 | 365 | 27% | 2% | PEG-0838 | none | 26% | 1% |
| PEG-0649 | 346 | 28% | 4% | PEG-1248 | 365 | 22% | 3% | PEG-0838 | none | 23% | 1% |
| PEG-0673 | 346 | 28% | 3% | PEG-0829 | 366 | 17% | 5% | PEG-0838 | none | 18% | 0% |
| PEG-0738 | 346 | 27% | 3% | PEG-0838 | 366 | 14% | 6% | PEG-0838 | none | 17% | 1% |
| PEG-0754 | 346 | 19% | 1% | PEG-0962 | 366 | 15% | 4% | PEG-0838 | none | 16% | 1% |
| PEG-0065 | 347 | 23% | 2% | PEG-1208 | 366 | 20% | 3% | PEG-0838 | none | 14% | 1% |
| PEG-0625 | 347 | 31% | 3% | PEG-1228 | 366 | 24% | 4% | PEG-0962 | none | 24% | 1% |
| PEG-0649 | 347 | 30% | 4% | PEG-1248 | 366 | 18% | 6% | PEG-0962 | none | 20% | 1% |
| PEG-0673 | 347 | 28% | 3% | PEG-0829 | 367 | 18% | 4% | PEG-0962 | none | 19% | 1% |
| PEG-0738 | 347 | 27% | 2% | PEG-0838 | 367 | 15% | 4% | PEG-0962 | none | 18% | 0% |
| PEG-0754 | 347 | 18% | 1% | PEG-0962 | 367 | 15% | 3% | PEG-0962 | none | 16% | 1% |
| PEG-0829 | 348 | 26% | 3% | PEG-1208 | 367 | 15% | 6% | PEG-0962 | none | 14% | 1% |
| PEG-0838 | 348 | 22% | 2% | PEG-1228 | 367 | 20% | 4% | PEG-0962 | none | 13% | 1% |
| PEG-0962 | 348 | 18% | 1% | PEG-1248 | 367 | 18% | 5% | PEG-0962 | none | 13% | 1% |
| PEG-1208 | 348 | 22% | 1% | PEG-0829 | 368 | 15% | 8% | PEG-1208 | none | 30% | 1% |
| PEG-1228 | 348 | 26% | 2% | PEG-0838 | 368 | 15% | 8% | PEG-1208 | none | 30% | 1% |
| PEG-1248 | 348 | 20% | 2% | PEG-0962 | 368 | 16% | 9% | PEG-1208 | none | 24% | 1% |
| PEG-0829 | 349 | 30% | 2% | PEG-1208 | 368 | 17% | 5% | PEG-1208 | none | 23% | 1% |
| PEG-0838 | 349 | 25% | 3% | PEG-1228 | 368 | 23% | 7% | PEG-1208 | none | 23% | 1% |
| PEG-0962 | 349 | 19% | 1% | PEG-1248 | 368 | 18% | 12% | PEG-1208 | none | 22% | 1% |
| PEG-1208 | 349 | 23% | 1% | PEG-0829 | 369 | 12% | 3% | PEG-1208 | none | 21% | 1% |
| PEG-1228 | 349 | 30% | 2% | PEG-0838 | 369 | 12% | 5% | PEG-1208 | none | 20% | 1% |
| PEG-1248 | 349 | 20% | 1% | PEG-0962 | 369 | 10% | 4% | PEG-1228 | none | 26% | 1% |
| PEG-0829 | 350 | 27% | 4% | PEG-1208 | 369 | 18% | 4% | PEG-1228 | none | 25% | 1% |
| PEG-0838 | 350 | 27% | 4% | PEG-1228 | 369 | 17% | 4% | PEG-1228 | none | 24% | 1% |
| PEG-0962 | 350 | 19% | 2% | PEG-1248 | 369 | 12% | 5% | PEG-1228 | none | 23% | 1% |
| PEG-1208 | 350 | 25% | 3% | PEG-0065 | 370 | 9% | 11% | PEG-1228 | none | 23% | 1% |
| PEG-1228 | 350 | 31% | 3% | PEG-0625 | 370 | 7% | 9% | PEG-1228 | none | 22% | 1% |
| PEG-1248 | 350 | 20% | 2% | PEG-0649 | 370 | 8% | 10% | PEG-1228 | none | 19% | 1% |
| PEG-0829 | 351 | 22% | 2% | PEG-0673 | 370 | 6% | 7% | PEG-1228 | none | 19% | 1% |
| PEG-0838 | 351 | 19% | 2% | PEG-0738 | 370 | 9% | 5% | PEG-1248 | none | 21% | 1% |
| PEG-0962 | 351 | 13% | 1% | PEG-0754 | 370 | 4% | 2% | PEG-1248 | none | 21% | 1% |
| PEG-1208 | 351 | 22% | 1% | PEG-0829 | 370 | 23% | 1% | PEG-1248 | none | 21% | 1% |
| PEG-1228 | 351 | 26% | 2% | PEG-0838 | 370 | 17% | 1% | PEG-1248 | none | 19% | 1% |
| PEG-1248 | 351 | 18% | 1% | PEG-0962 | 370 | 15% | 1% | PEG-1248 | none | 18% | 1% |
| PEG-0829 | 352 | 29% | 2% | PEG-1208 | 370 | 22% | 1% | PEG-1248 | none | 17% | 1% |
| PEG-0838 | 352 | 22% | 1% | PEG-1228 | 370 | 21% | 2% | PEG-1248 | none | 17% | 1% |
| PEG-0962 | 352 | 13% | 1% | PEG-1248 | 370 | 20% | 1% | PEG-1248 | none | 15% | 1% |

TABLE 18j
Correction of G339C using PE3 systems, experiment 3.

| | | First trial | | | | | | Second trial | | | | | |
|---|---|---|---|---|---|---|---|---|---|---|---|---|---|
| | | Replicate A | | Replicate B | | Replicate C | | Replicate A | | Replicate B | | Replicate C | |
| PEG# | ng# | edit % | indel % | edit % | indel % | edit % | indel % | edit % | indel % | edit % | indel % | edit % | indel % |
| 4005 | 5003 | 40.1 | 1.1 | 40.7 | 40.7 | 44.5 | 1.2 | 40.9 | 1.3 | 43.3 | 1.4 | 42.2 | 1.2 |
| 625 | 5003 | 29.1 | 1.9 | 34.1 | 34.1 | 35.4 | 2.4 | 33.6 | 1.6 | 34.7 | 2.1 | 40.3 | 2.1 |
| 670 | 5002 | 40.4 | 1.1 | 45.0 | 45.0 | 46.5 | 1.2 | 44.8 | 1.2 | 44.4 | 0.9 | 46.2 | 1.1 |
| 673 | 5002 | 35.4 | 1.1 | 34.6 | 34.6 | 37.0 | 1.5 | 34.8 | 1.3 | 37.1 | 1.3 | 38.6 | 1.2 |
| 674 | 5002 | 27.5 | 1.0 | 35.8 | 35.8 | 34.2 | 1.2 | 37.3 | 1.3 | 38.4 | 1.3 | 39.9 | 1.5 |
| 49 | 338 | 43.0 | 6.8 | 47.2 | 47.2 | 45.4 | 7.7 | 43.4 | 6.9 | 45.4 | 8.3 | 49.0 | 9.1 |
| 47 | 338 | 38.2 | 5.8 | 48.3 | 48.3 | 44.8 | 6.3 | 43.9 | 6.7 | 48.3 | 6.5 | 49.7 | 7.8 |
| 56 | 338 | 35.7 | 6.7 | 42.3 | 42.3 | 42.0 | 8.6 | 43.1 | 8.1 | 43.2 | 9.0 | 45.4 | 10.2 |
| 50 | 338 | 34.1 | 9.3 | 31.1 | 31.1 | 34.5 | 10.0 | 41.7 | 13.4 | 41.4 | 13.1 | 44.5 | 13.3 |
| 65 | 338 | 24.7 | 7.9 | 28.2 | 28.2 | 24.1 | 9.3 | 23.9 | 6.6 | 25.2 | 7.4 | 27.6 | 13.9 |
| 67 | 338 | 26.1 | 4.2 | 26.0 | 26.0 | 26.3 | 4.3 | 22.7 | 3.9 | 25.3 | 3.7 | 25.8 | 3.7 |
| 645 | 5001 | 39.9 | 1.9 | 42.3 | 42.3 | 45.6 | 2.1 | 47.4 | 1.3 | 43.6 | 2.0 | 47.3 | 1.9 |
| 646 | 5001 | 41.2 | 1.0 | 40.5 | 40.5 | 43.6 | 1.0 | 40.4 | 0.9 | 41.6 | 0.8 | 43.0 | 1.0 |
| 4006 | 5001 | 34.1 | 2.0 | 40.7 | 40.7 | 45.7 | 2.7 | 40.1 | 2.6 | 41.8 | 2.9 | 44.6 | 2.0 |
| 649 | 5001 | 32.2 | 3.3 | 29.3 | 29.3 | 29.9 | 3.2 | 34.6 | 3.6 | 35.7 | 3.4 | 39.1 | 3.9 |
| 645 | 364 | 54.0 | 1.5 | 52.8 | 52.8 | 53.3 | 1.6 | 59.8 | 1.6 | 56.7 | 1.7 | 60.9 | 1.4 |
| 670 | 364 | 49.3 | 0.8 | 55.9 | 55.9 | 54.6 | 1.2 | 53.3 | 1.0 | 54.6 | 1.2 | 57.2 | 0.9 |
| 646 | 364 | 56.1 | 0.7 | 50.8 | 50.8 | 49.4 | 1.0 | 56.9 | 0.9 | 53.6 | 0.8 | 55.3 | 1.0 |
| 4006 | 364 | 46.9 | 1.5 | 53.0 | 53.0 | 51.2 | 2.1 | 47.8 | 1.6 | 48.9 | 1.8 | 52.5 | 1.9 |
| 4005 | 364 | 52.8 | 1.1 | 49.8 | 49.8 | 47.6 | 1.1 | 48.0 | 0.9 | 49.7 | 1.1 | 52.1 | 1.1 |
| 649 | 364 | 37.3 | 2.3 | 35.5 | 35.5 | 31.2 | 2.3 | 41.3 | 2.3 | 40.3 | 2.0 | 41.4 | 2.1 |
| 674 | 364 | 32.0 | 1.1 | 38.2 | 38.2 | 32.0 | 1.2 | 35.7 | 1.1 | 39.1 | 1.1 | 40.8 | 1.4 |
| 673 | 364 | 31.3 | 1.2 | 32.7 | 32.7 | 37.8 | 1.5 | 31.4 | 1.0 | 35.3 | 0.9 | 35.0 | 1.3 |
| 625 | 364 | 21.8 | 1.0 | 33.5 | 33.5 | 34.7 | 1.3 | 38.9 | 1.2 | 36.7 | 0.9 | 36.8 | 1.5 |
| 49 | 364 | 29.2 | 4.8 | 29.8 | 29.8 | 32.1 | 5.9 | 31.2 | 5.4 | 30.7 | 5.2 | 31.5 | 5.6 |
| 47 | 364 | 26.6 | 4.2 | 28.7 | 28.7 | 30.0 | 4.6 | 31.7 | 5.2 | 30.1 | 5.0 | 30.3 | 4.8 |
| 50 | 364 | 24.5 | 7.5 | 23.4 | 23.4 | 24.3 | 7.2 | 24.4 | 8.4 | 24.5 | 8.9 | 24.2 | 8.7 |
| 56 | 364 | 21.8 | 4.3 | 22.1 | 22.1 | 23.4 | 4.9 | 21.2 | 4.6 | 20.9 | 5.2 | 21.8 | 4.4 |
| 65 | 364 | 9.9 | 3.4 | 11.3 | 11.3 | 13.1 | 5.7 | 10.2 | 4.5 | 10.8 | 3.9 | 11.5 | 4.7 |
| 67 | 364 | 10.0 | 1.8 | 12.1 | 12.1 | 13.5 | 2.9 | 9.6 | 2.5 | 11.7 | 2.2 | 9.3 | 2.6 |
| 4009 | 5005 | 12.2 | 1.9 | 10.9 | 10.9 | 9.5 | 1.6 | 14.3 | 2.5 | 14.9 | 2.4 | 15.3 | 2.6 |
| 292 | 337 | 31.7 | 2.1 | 34.1 | 34.1 | 31.4 | 1.9 | 36.9 | 2.8 | 39.0 | 3.2 | 39.9 | 3.4 |
| 251 | 337 | 11.4 | 0.7 | 11.6 | 11.6 | 11.6 | 0.6 | 13.8 | 0.8 | 13.2 | 1.3 | 13.2 | 1.0 |
| 237 | 337 | 5.2 | 0.3 | 7.4 | 7.4 | 7.2 | 0.3 | 9.6 | 0.6 | 10.1 | 0.3 | 11.8 | 0.8 |
| 238 | 337 | 8.1 | 0.4 | 7.5 | 7.5 | 5.5 | 0.3 | 8.5 | 0.4 | 9.3 | 0.6 | 9.1 | 0.4 |
| 4007 | 5006 | 15.3 | 1.3 | 16.3 | 16.3 | 15.6 | 1.5 | 20.2 | 2.2 | 19.6 | 2.2 | 21.0 | 2.1 |
| 738 | 5006 | 12.0 | 1.2 | 11.3 | 11.3 | 14.8 | 1.6 | 16.1 | 1.5 | 16.2 | 1.6 | 17.8 | 2.1 |
| 746 | 5006 | 6.9 | 0.8 | 5.0 | 5.0 | 7.1 | 0.9 | 7.3 | 0.6 | 9.3 | 1.4 | 10.9 | 1.4 |
| 1224 | 365 | 45.2 | 0.8 | 46.7 | 46.7 | 49.5 | 1.0 | 48.2 | 1.0 | 51.4 | 1.0 | 55.7 | 0.7 |
| 1225 | 365 | 32.3 | 0.6 | 35.7 | 35.7 | 38.8 | 0.8 | 38.0 | 0.7 | 41.8 | 1.0 | 42.6 | 0.9 |
| 944 | 365 | 26.5 | 0.9 | 33.7 | 33.7 | 36.3 | 1.4 | 40.0 | 1.4 | 39.7 | 2.0 | 38.8 | 1.3 |
| 4012 | 365 | 28.5 | 1.3 | 27.4 | 27.4 | 28.7 | 1.1 | 33.1 | 1.4 | 31.9 | 1.5 | 35.2 | 1.4 |
| 962 | 365 | 27.3 | 0.7 | 27.8 | 27.8 | 24.4 | 0.6 | 33.3 | 1.0 | 31.3 | 0.8 | 34.0 | 1.5 |
| 946 | 365 | 25.4 | 0.6 | 27.2 | 27.2 | 29.8 | 0.6 | 30.2 | 0.6 | 28.3 | 0.7 | 32.2 | 0.8 |
| 4011 | 365 | 29.0 | 0.6 | 24.7 | 24.7 | 26.8 | 0.6 | 32.3 | 0.6 | 28.8 | 0.8 | 28.6 | 0.5 |
| 956 | 365 | 24.2 | 0.7 | 26.5 | 26.5 | 27.8 | 0.6 | 29.0 | 0.8 | 30.6 | 1.0 | 29.0 | 1.0 |
| 1215 | 365 | 17.9 | 0.7 | 25.5 | 25.5 | 30.2 | 1.3 | 29.0 | 1.2 | 31.8 | 1.2 | 30.5 | 1.6 |
| 959 | 365 | 19.7 | 0.5 | 18.8 | 18.8 | 19.6 | 0.6 | 27.9 | 1.0 | 27.8 | 1.3 | 30.2 | 1.1 |
| 1217 | 365 | 15.9 | 0.8 | 21.2 | 21.2 | 23.2 | 1.1 | 24.9 | 1.9 | 24.1 | 1.8 | 28.1 | 1.4 |
| 1208 | 365 | 17.0 | 0.9 | 18.7 | 18.7 | 20.8 | 0.9 | 24.5 | 0.7 | 24.0 | 0.9 | 27.0 | 0.9 |
| 1000 | 365 | 10.6 | 0.4 | 17.3 | 17.3 | 18.1 | 0.8 | 18.9 | 0.7 | 21.4 | 0.9 | 20.6 | 0.7 |
| 986 | 365 | 9.8 | 0.5 | 11.0 | 11.0 | 13.1 | 0.6 | 15.7 | 0.8 | 16.1 | 0.9 | 17.8 | 1.2 |
| 1224 | 356 | 49.0 | 2.9 | 55.7 | 55.7 | 55.5 | 3.6 | 60.6 | 3.3 | 60.0 | 4.3 | 65.4 | 5.2 |
| 1225 | 356 | 43.1 | 1.7 | 50.6 | 50.6 | 51.5 | 3.3 | 51.3 | 2.2 | 54.8 | 3.1 | 51.5 | 2.8 |
| 944 | 356 | 29.4 | 2.9 | 37.5 | 37.5 | 36.8 | 5.2 | 38.6 | 4.0 | 42.2 | 6.3 | 41.6 | 3.6 |
| 4012 | 356 | 33.0 | 3.7 | 32.2 | 32.2 | 33.9 | 3.8 | 41.1 | 4.1 | 38.8 | 4.0 | 43.7 | 5.7 |
| 946 | 356 | 28.9 | 2.6 | 32.7 | 32.7 | 33.3 | 3.0 | 35.2 | 2.9 | 36.3 | 3.0 | 38.6 | 3.3 |
| 4011 | 356 | 33.6 | 2.6 | 28.2 | 28.2 | 31.0 | 2.0 | 35.5 | 1.8 | 37.8 | 2.6 | 38.9 | 2.5 |
| 962 | 356 | 24.9 | 1.7 | 26.7 | 26.7 | 28.7 | 1.6 | 37.6 | 3.5 | 37.1 | 3.6 | 39.8 | 4.6 |
| 1215 | 356 | 20.5 | 1.4 | 27.3 | 27.3 | 32.5 | 3.4 | 31.1 | 3.0 | 37.0 | 3.7 | 36.3 | 3.8 |
| 956 | 356 | 22.8 | 1.4 | 31.2 | 31.2 | 30.4 | 2.2 | 31.2 | 1.8 | 34.2 | 3.1 | 34.1 | 2.5 |
| 1217 | 356 | 21.6 | 1.9 | 27.0 | 27.0 | 29.5 | 3.7 | 32.8 | 4.6 | 33.6 | 3.7 | 38.7 | 4.6 |
| 1208 | 356 | 19.2 | 1.8 | 23.8 | 23.8 | 28.7 | 3.1 | 31.9 | 2.7 | 32.8 | 3.5 | 37.5 | 4.8 |
| 959 | 356 | 18.8 | 1.1 | 17.7 | 17.7 | 22.4 | 1.3 | 30.7 | 3.0 | 31.9 | 3.2 | 33.3 | 4.0 |
| 1000 | 356 | 10.4 | 0.8 | 20.3 | 20.3 | 22.0 | 1.8 | 20.4 | 1.5 | 25.5 | 2.7 | 24.0 | 2.5 |
| 986 | 356 | 12.5 | 1.4 | 15.5 | 15.5 | 16.8 | 1.8 | 16.3 | 1.8 | 17.9 | 2.2 | 21.1 | 2.3 |
| 801 | 354 | 40.3 | 9.5 | 41.5 | 41.5 | 42.2 | 10.9 | 42.7 | 10.2 | 47.4 | 9.9 | 45.1 | 10.8 |
| 837 | 354 | 31.5 | 5.4 | 37.6 | 37.6 | 38.0 | 7.5 | 37.9 | 9.5 | 41.1 | 9.5 | 43.6 | 9.1 |
| 819 | 354 | 36.6 | 6.9 | 36.1 | 36.1 | 38.7 | 8.7 | 37.8 | 7.1 | 40.0 | 7.7 | 40.4 | 6.8 |
| 828 | 354 | 29.3 | 4.9 | 37.8 | 37.8 | 39.4 | 7.6 | 41.3 | 7.5 | 39.9 | 8.3 | 40.2 | 7.5 |
| 820 | 354 | 28.3 | 5.5 | 36.4 | 36.4 | 36.2 | 7.7 | 40.1 | 8.5 | 41.2 | 10.2 | 43.1 | 10.9 |
| 838 | 354 | 32.2 | 5.6 | 31.5 | 31.5 | 35.5 | 6.8 | 36.1 | 5.7 | 37.0 | 6.7 | 36.3 | 6.5 |
| 829 | 354 | 24.7 | 3.6 | 28.6 | 28.6 | 30.9 | 4.5 | 33.1 | 6.6 | 35.1 | 7.1 | 35.8 | 9.0 |
| 805 | 354 | 21.8 | 2.5 | 23.6 | 23.6 | 24.7 | 3.4 | 23.6 | 2.3 | 26.9 | 3.0 | 30.8 | 5.4 |
| 801 | 353 | 36.4 | 14.1 | 36.9 | 36.9 | 38.2 | 17.1 | 43.0 | 14.3 | 43.7 | 15.2 | 44.6 | 14.5 |
| 837 | 353 | 31.2 | 7.5 | 35.2 | 35.2 | 35.2 | 10.4 | 38.7 | 10.6 | 41.0 | 12.6 | 39.4 | 13.2 |
| 819 | 353 | 31.0 | 7.9 | 36.7 | 36.7 | 36.2 | 13.2 | 37.6 | 9.9 | 38.4 | 11.2 | 39.0 | 9.7 |
| 820 | 353 | 29.8 | 8.0 | 35.3 | 35.3 | 35.6 | 10.9 | 39.0 | 12.8 | 39.1 | 13.9 | 40.0 | 15.1 |
| 828 | 353 | 25.0 | 5.0 | 35.4 | 35.4 | 36.7 | 10.5 | 38.4 | 9.8 | 39.5 | 10.5 | 40.9 | 11.0 |
| 838 | 353 | 33.0 | 9.0 | 31.9 | 31.9 | 33.4 | 9.6 | 35.9 | 8.2 | 37.0 | 9.6 | 38.0 | 11.7 |
| 829 | 353 | 26.1 | 4.9 | 30.0 | 30.0 | 31.0 | 6.8 | 36.7 | 10.8 | 35.1 | 9.5 | 37.8 | 11.7 |
| 805 | 353 | 23.9 | 5.1 | 21.8 | 21.8 | 23.6 | 5.0 | 26.5 | 4.9 | 27.6 | 6.7 | 29.9 | 6.9 |
| 292 | 5016 | 37.8 | 2.9 | 39.4 | 39.4 | 42.1 | 3.2 | 48.6 | 3.4 | 51.2 | 4.2 | | |
| 4007 | 5016 | 24.9 | 2.3 | 22.6 | 22.6 | 23.5 | 2.2 | 35.6 | 3.2 | 30.4 | 3.3 | 37.7 | 3.4 |
| 738 | 5016 | 18.5 | 1.8 | 19.4 | 19.4 | 23.6 | 2.5 | 27.5 | 2.8 | 27.2 | 3.5 | 29.4 | 3.1 |
| 251 | 5016 | 18.3 | 1.6 | 19.2 | 19.2 | 18.1 | 1.6 | 20.7 | 1.2 | 20.8 | 2.1 | 24.4 | 2.6 |
| 746 | 5016 | 13.4 | 1.5 | 12.4 | 12.4 | 13.8 | 1.7 | 16.7 | 2.1 | 20.7 | 1.8 | 24.4 | 2.2 |
| 4009 | 5016 | 14.1 | 2.7 | 11.9 | 11.9 | 11.0 | 1.9 | 19.6 | 4.3 | 19.8 | 4.1 | 17.7 | 3.9 |
| 237 | 5016 | 7.4 | 0.6 | 9.4 | 9.4 | 11.4 | 1.0 | 16.0 | 1.4 | 16.3 | 1.4 | 16.6 | 1.9 |
| 238 | 5016 | 7.3 | 0.5 | 6.8 | 6.8 | 6.0 | 0.4 | 11.7 | 1.0 | 13.3 | 1.2 | 14.5 | 1.2 |

TABLE 18k
Correction of G339C using PE3 systems in iPSC.

| | | | | Trial 1 | | | | Trial 2 | | | |
|---|---|---|---|---|---|---|---|---|---|---|---|
| | | | | Replcate A | | Replicate B | | Replcate A | | Replicate B | |
| PEG # | ng# | Dose | | Edit % | Indel % | Edit % | Indel % | Edit % | Indel % | Edit % | Indel % |
| 649 | 338 | 486.7 | ng | 5 | 0.27 | 6.78 | 0.28 | | | 18.58 | 0.79 |
| 649 | 338 | 324.5 | ng | 7.51 | 0.42 | 7.06 | 0.23 | 16.64 | 0.39 | 15.77 | 0.53 |
| 649 | 338 | 216.4 | ng | 4.37 | 0.28 | 4.55 | 0.21 | 12.99 | 0.56 | 14.13 | 0.61 |
| 649 | 338 | 144.3 | ng | 2.97 | 0.26 | 2.8 | 0.19 | 9.06 | 0.27 | 7.41 | 0.56 |
| 649 | 338 | 96.1 | ng | 1.62 | 0.18 | 1.17 | 0.16 | 3.95 | 0.1 | 3.88 | 0.28 |
| 649 | 338 | 64 | ng | 0.92 | 0.05 | 0.56 | 0.08 | 1.97 | 0.05 | 1.76 | 0.1 |
| 649 | 338 | 42.7 | ng | 0.35 | 0.1 | 0.22 | 0.12 | 0.59 | 0.14 | 0.88 | 0.12 |
| 649 | 338 | 28.5 | ng | 0.28 | 0.14 | 0.26 | 0.1 | 0.54 | 0.1 | 0.34 | 0.1 |
| 649 | 338 | 19 | ng | 0.12 | 0.08 | 0.12 | 0.04 | 0.14 | 0.07 | 0.2 | 0.16 |
| 649 | 338 | 12.7 | ng | 0.11 | 0.11 | 0.06 | 0.05 | 0.12 | 0.02 | 0.06 | 0.09 |
| 649 | 338 | 8.5 | ng | 0.07 | 0.12 | 0.11 | 0.06 | 0.15 | 0.03 | 0.15 | 0.13 |
| 649 | 338 | 5.6 | ng | 0.05 | 0.05 | 0.02 | 0.08 | 0.05 | 0.04 | | |
| 1208 | 367 | 486.7 | ng | 22.36 | 0.39 | 27.82 | 0.46 | | | | |
| 1208 | 367 | 324.5 | ng | 14.11 | 0.35 | 21.48 | 0.39 | 38.23 | 0.67 | 43.95 | 0.77 |
| 1208 | 367 | 216.4 | ng | 18.79 | 0.32 | 15.39 | 0.27 | 40.64 | 0.8 | 39.13 | 0.67 |
| 1208 | 367 | 144.3 | ng | 10.14 | 0.18 | 8.54 | 0.16 | 30.55 | 0.4 | 26.28 | 0.5 |
| 1208 | 367 | 96.1 | ng | 7.11 | 0.16 | 3.81 | 0.11 | 14.35 | 0.2 | 13.82 | 0.23 |
| 1208 | 367 | 64 | ng | 2.56 | 0.08 | 1.58 | 0.1 | 8.01 | 0.13 | 6.94 | 0.11 |
| 1208 | 367 | 42.7 | ng | 1.39 | 0.09 | 1.31 | 0.01 | 1.73 | 0.13 | 2.95 | 0.12 |
| 1208 | 367 | 28.5 | ng | 0.44 | 0.04 | 0.61 | 0.05 | 1.5 | 0.03 | 1.35 | 0.07 |
| 1208 | 367 | 19 | ng | 0.31 | 0.05 | 0.37 | 0.05 | 0.52 | 0.08 | 0.88 | 0.14 |
| 1208 | 367 | 12.7 | ng | 0.31 | 0.05 | 0.21 | 0.03 | 0.28 | 0.07 | 0.32 | 0.08 |
| 1208 | 367 | 8.5 | ng | 0.13 | 0.07 | 0.06 | 0.03 | 0.07 | 0.05 | 0.21 | 0.05 |
| 1208 | 367 | 5.6 | ng | 0.11 | 0.06 | 0.06 | 0.07 | 0.11 | 0.06 | 0.17 | 0.13 |
| 829 | 354 | 486.7 | ng | 17.99 | 1.18 | 18.26 | 1 | | | 29.01 | 2.45 |
| 829 | 354 | 324.5 | ng | 17.41 | 1.06 | 14.54 | 0.58 | 17.92 | 3.71 | 24.63 | 2.06 |
| 829 | 354 | 216.4 | ng | 10.4 | 0.32 | 9.74 | 0.33 | 24.91 | 1.07 | 22.04 | 1.17 |
| 829 | 354 | 144.3 | ng | 7.15 | 0.31 | 3.82 | 0.11 | 16.84 | 0.42 | 12.1 | 0.45 |
| 829 | 354 | 96.1 | ng | 4.54 | 0.16 | 1.99 | 0.04 | 12.95 | 0.21 | 6.01 | 0.28 |
| 829 | 354 | 64 | ng | 1.54 | 0.04 | 1.01 | 0.03 | 3.62 | 0.06 | 2.86 | 0.17 |
| 829 | 354 | 42.7 | ng | 0.74 | 0.06 | 0.32 | 0.03 | 2.12 | 0.1 | 1.39 | 0.07 |
| 829 | 354 | 28.5 | ng | 0.32 | 0.06 | 0.26 | 0.03 | 0.48 | 0.07 | 0.53 | 0.12 |
| 829 | 354 | 19 | ng | 0.13 | 0.06 | 0.11 | 0.07 | 0.36 | 0.08 | 0.39 | 0.13 |
| 829 | 354 | 12.7 | ng | 0.14 | 0.06 | 0.07 | 0.08 | 0.14 | 0.12 | 0.15 | 0.1 |
| 829 | 354 | 8.5 | ng | 0.05 | 0.08 | 0.03 | 0.03 | 0.17 | 0.12 | 0.14 | 0.11 |
| 829 | 354 | 5.6 | ng | 0.11 | 0.07 | 0.03 | 0.08 | 0.01 | 0.08 | 0.09 | 0.04 |
| 738 | 5017 | 486.7 | ng | 5.99 | 1.34 | 3.47 | 0.58 | | | 6.87 | 1.61 |
| 738 | 5017 | 324.5 | ng | 1.89 | 0.57 | 2.64 | 0.59 | 2.34 | 0.54 | 4.41 | 1.06 |
| 738 | 5017 | 216.4 | ng | 2.46 | 0.37 | 1.5 | 0.11 | 7.12 | 1.48 | 2.85 | 0.62 |
| 738 | 5017 | 144.3 | ng | 1.29 | 0.43 | 0.34 | 0.09 | 2.9 | 0.67 | 1.5 | 0.38 |
| 738 | 5017 | 96.1 | ng | 0.41 | 0.12 | 0.35 | 0.05 | 2.26 | 0.06 | 0.73 | 0.22 |
| 738 | 5017 | 64 | ng | 0.2 | 0.05 | 0.02 | 0.06 | 0.61 | 0.34 | 0.22 | 0.11 |
| 738 | 5017 | 42.7 | ng | 0.08 | 0.08 | 0.06 | 0.03 | 0.05 | 0.05 | 0.04 | 0.09 |
| 738 | 5017 | 28.5 | ng | 0.05 | 0.04 | 0.03 | 0.07 | 0.06 | 0.06 | 0.01 | 0.16 |
| 738 | 5017 | 19 | ng | 0.07 | 0.09 | 0.01 | 0.08 | 0.07 | 0.08 | 0.04 | 0.11 |
| 738 | 5017 | 12.7 | ng | 0.07 | 0.08 | 0.03 | 0.07 | 0.02 | 0.1 | 0.05 | 0.09 |
| 738 | 5017 | 8.5 | ng | 0.04 | 0.05 | 0.04 | 0.02 | 0.02 | 0.09 | 0.03 | 0.1 |
| 738 | 5017 | 5.6 | ng | 0.01 | 0.05 | 0.01 | 0.04 | 0.01 | 0.1 | 0.04 | 0.11 |
| 649 | none | 486.7 | ng | 11.35 | 0.75 | 7.3 | 0.37 | | | 9.94 | 0.41 |
| 649 | none | 324.5 | ng | 8.86 | 0.59 | 6.86 | 0.34 | 3.47 | 0.81 | 12.18 | 0.55 |
| 649 | none | 216.4 | ng | 8.35 | 0.48 | 3.83 | 0.36 | 13.48 | 0.7 | 9.21 | 0.51 |
| 649 | none | 144.3 | ng | 4.03 | 0.26 | 1.77 | 0.09 | 8.48 | 0.4 | 5.71 | 0.3 |
| 649 | none | 96.1 | ng | 1.75 | 0.2 | 0.9 | 0.11 | 6.55 | 0.38 | 2.48 | 0.22 |
| 649 | none | 64 | ng | 0.66 | 0.09 | 0.59 | 0.08 | 1.7 | 0.03 | 1.13 | 0.22 |
| 649 | none | 42.7 | ng | 0.3 | 0.05 | 0.44 | 0.03 | 0.89 | 0.26 | 0.53 | 0.13 |
| 649 | none | 28.5 | ng | 0.16 | 0.06 | 0.29 | 0.1 | 0.25 | 0.09 | 0.38 | 0.07 |
| 649 | none | 19 | ng | 0.08 | 0.06 | 0.14 | 0.02 | 0.33 | 0.07 | 0.14 | 0.17 |
| 649 | none | 12.7 | ng | 0.06 | 0.09 | 0.04 | 0.05 | 0.21 | 0.06 | 0.08 | 0.11 |
| 649 | none | 8.5 | ng | 0.02 | 0.08 | 0.05 | 0.09 | 0.14 | 0.06 | 0.06 | 0.08 |
| 649 | none | 5.6 | ng | 0.06 | 0.1 | 0.02 | 0.03 | 0.17 | 0.15 | 0.03 | 0.05 |
| 1208 | none | 486.7 | ng | 11.7 | 0.46 | 9.52 | 0.22 | | | 14.19 | 0.29 |
| 1208 | none | 324.5 | ng | 6.55 | 0.14 | 7.66 | 0.17 | 6.99 | 0.98 | 13.12 | 0.54 |
| 1208 | none | 216.4 | ng | 8.78 | 0.16 | 7.67 | 0.14 | 11.23 | 0.6 | 9.4 | 0.33 |
| 1208 | none | 144.3 | ng | 5.84 | 0.16 | 3.03 | 0.1 | 7.7 | 0.28 | 7.98 | 0.25 |
| 1208 | none | 96.1 | ng | 3.99 | 0.1 | 2.15 | 0.07 | 5.76 | 0.14 | 4.99 | 0.15 |
| 1208 | none | 64 | ng | 1.79 | 0.08 | 1.22 | 0.06 | 5.9 | 0.18 | 2.48 | 0.13 |
| 1208 | none | 42.7 | ng | 0.92 | 0.07 | 0.62 | 0.09 | 2.86 | 0.09 | 1.41 | 0.16 |
| 1208 | none | 28.5 | ng | 0.55 | 0.1 | 0.38 | 0.03 | 0.73 | 0.15 | 0.59 | 0.18 |
| 1208 | none | 19 | ng | 0.31 | 0.07 | 0.19 | 0.07 | 0.13 | 0.07 | 0.21 | 0.1 |
| 1208 | none | 12.7 | ng | 0.11 | 0.04 | 0.09 | 0.07 | 0.16 | 0.13 | 0.18 | 0.13 |
| 1208 | none | 8.5 | ng | 0.13 | 0.08 | 0.09 | 0.08 | 0.33 | 0.05 | 0.09 | 0.1 |
| 1208 | none | 5.6 | ng | 0.06 | 0.09 | 0.06 | 0.02 | 0.04 | 0.02 | 0.08 | 0.1 |
| 829 | none | 486.7 | ng | 15.4 | 0.55 | 12.76 | 0.39 | | | 21.84 | 0.7 |
| 829 | none | 324.5 | ng | 13.72 | 0.5 | 8.86 | 0.28 | 16.18 | 1.05 | 19.2 | 0.77 |
| 829 | none | 216.4 | ng | 7.72 | 0.16 | 5.86 | 0.13 | 19.99 | 0.99 | 12.65 | 0.23 |
| 829 | none | 144.3 | ng | 5.29 | 0.15 | 3.07 | 0.09 | 13.99 | 0.41 | 11.92 | 0.48 |
| 829 | none | 96.1 | ng | 2.64 | 0.06 | 1.52 | 0.05 | 12.2 | 0.31 | 6.54 | 0.24 |
| 829 | none | 64 | ng | 1.24 | 0.08 | 0.65 | 0.04 | 7.69 | 0.23 | 2.74 | 0.18 |
| 829 | none | 42.7 | ng | 0.56 | 0.04 | 0.3 | 0.05 | 2.82 | 0.09 | 1.1 | 0.08 |
| 829 | none | 28.5 | ng | 0.36 | 0.06 | 0.12 | 0.06 | 0.58 | 0.05 | 0.45 | 0.15 |
| 829 | none | 19 | ng | 0.19 | 0.06 | 0.11 | 0.07 | 0.54 | 0.11 | 0.17 | 0.08 |
| 829 | none | 12.7 | ng | 0.18 | 0.08 | 0.05 | 0.07 | 0.33 | 0.09 | 0.26 | 0.13 |
| 829 | none | 8.5 | ng | 0.07 | 0.09 | 0.05 | 0.05 | 0.06 | 0.09 | 0.15 | 0.07 |
| 829 | none | 5.6 | ng | 0.02 | 0.05 | 0.04 | 0.06 | 0.14 | 0.1 | 0.05 | 0.1 |
| 738 | none | 486.7 | ng | 1.84 | 0.28 | 1.84 | 0.08 | | | 3.38 | 0.5 |
| 738 | none | 324.5 | ng | 2.22 | 0.23 | 1.11 | 0.08 | 3.48 | 0.23 | 2.23 | 0.17 |
| 738 | none | 216.4 | ng | 1.8 | 0.18 | 0.61 | 0.15 | 2.13 | 0.64 | 1.41 | 0.17 |
| 738 | none | 144.3 | ng | 0.56 | 0.12 | 0.41 | 0.09 | 1.69 | 0.34 | 0.7 | 0.22 |
| 738 | none | 96.1 | ng | 0.3 | 0.11 | 0.14 | 0.07 | 0.44 | 0.14 | 0.44 | 0.1 |
| 738 | none | 64 | ng | 0.15 | 0.07 | 0.05 | 0.04 | 0.53 | 0.11 | 0.24 | 0.08 |
| 738 | none | 42.7 | ng | 0.01 | 0.06 | 0.04 | 0.1 | 0.03 | 0.08 | 0.04 | 0.05 |
| 738 | none | 28.5 | ng | 0.03 | 0.08 | 0.03 | 0.03 | 0.02 | 0.05 | 0.1 | 0.12 |
| 738 | none | 19 | ng | 0.04 | 0.05 | 0.02 | 0.1 | 0.03 | 0.16 | 0.04 | 0.13 |
| 738 | none | 12.7 | ng | 0.03 | 0.06 | 0.01 | 0.07 | 0.03 | 0.08 | 0.02 | 0.15 |
| 738 | none | 8.5 | ng | 0.05 | 0.08 | 0.03 | 0.05 | 0.03 | 0.1 | 0.03 | 0.19 |
| 738 | none | 5.6 | ng | 0.06 | 0.03 | 0.01 | 0.09 | 0.02 | 0.02 | 0.04 | 0.15 |

TABLE 181
Partial list of sequences

| SEQ ID | |
|---|---|
| NO. | Sequence |
| 54 | guuuuAGAGCUAGAAAUAGCAAGUUAAAAUAAGGCUAGUCCGUUAUCAACU |
| | UGAAAAAGUGGCACCGAGUCGgugc |
| 57 | AACAUUGACGCGUCUCUACGUGGGGGCGCG |
| 60 | CAGGGCAAUGGGGCCAUACG |
| 61 | UGACUCCAAACAGGGCAAUG |
| 62 | AUGACUCCAAACAGGGCAAU |
| 63 | UAUGACUCCAAACAGGGCAA |
| 64 | GUUGGCUAUGACUCCAAACA |
| 65 | CGUUGGCUAUGACUCCAAAC |
| 66 | CAGCUCUGGAUCCUGGUAUU |
| 67 | GCAGCUCUGGAUCCUGGUAU |
| 68 | CCCUUGGCAGCUCUGGAUCC |
| 69 | CACUCUGCCCUUGGCAGCUC |
| 70 | UgGUUUCUCCUCGU |
| 71 | UUgGUUUCaguUCGU |
| 72 | UUgGUUUCUcuuCGU |
| 73 | UUgGUUUCUcguCGU |
| 74 | UUgGUUUCagcUCGU |
| 75 | UUgGUUUCUcauCGU |
| 76 | UUgGUUUCUCCUCGU |
| 77 | UUUgGUUUCUCCUCGU |
| 78 | AUUUgGUUUCaguUCGU |
| 79 | AUUUgGUUUCUcuuCGU |
| 80 | AUUUgGUUUCUcguCGU |
| 81 | AUUUgGUUUCagcUCGU |
| 82 | AUUUgGUUUCUcauCGU |
| 83 | AUUUgGUUUCUCCUCGU |
| 84 | UAUUUgGUUUCUCCUCGU |
| 85 | GUAUUUgGUUUCaguUCGU |
| 86 | GUAUUUgGUUUCUcuuCGU |
| 87 | GUAUUUgGUUUCUcguCGU |
| 88 | GUAUUUgGUUUCagcUCGU |
| 89 | GUAUUUgGUUUCUcauCGU |
| 90 | GUAUUUgGUUUCUCCUCGU |
| 91 | UGUAUUUgGUUUCUCCUCGU |
| 92 | GCUGUAUUUgGUUUCaguUCGU |
| 93 | GCUGUAUUUgGUUUCUcuuCGU |
| 94 | GCUGUAUUUgGUUUCUcguCGU |
| 95 | GCUGUAUUUgGUUUCagcUCGU |
| 96 | GCUGUAUUUgGUUUCUcauCGU |
| 97 | GCUGUAUUUgGUUUCUCCUCGU |
| 98 | AGCUGUAUUUgGUUUCUCCUCGU |
| 99 | GAGCUGUAUUUgGUUUCUCCUCGU |
| 100 | GGAGCUGUAUUUgGUUUCaguUCGU |
| 101 | GGAGCUGUAUUUgGUUUCUcuuCGU |
| 102 | GGAGCUGUAUUUgGUUUCUcguCGU |
| 103 | GGAGCUGUAUUUgGUUUCagcUCGU |
| 104 | GGAGCUGUAUUUgGUUUCUcauCGU |
| 105 | GGAGCUGUAUUUgGUUUCUCCUCGU |
| 106 | GGGAGCUGUAUUUgGUUUCUCCUCGU |
| 107 | UGGGAGCUGUAUUUgGUUUCaguUCGU |
| 108 | UGGGAGCUGUAUUUgGUUUCUcuuCGU |
| 109 | UGGGAGCUGUAUUUgGUUUCUcguCGU |
| 110 | UGGGAGCUGUAUUUgGUUUCagcUCGU |
| 111 | UGGGAGCUGUAUUUgGUUUCUcauCGU |
| 112 | UGGGAGCUGUAUUUgGUUUCUCCUCGU |
| 113 | UUGGGAGCUGUAUUUgGUUUCUCCUCGU |
| 114 | AUUGGGAGCUGUAUUUgGUUUCUCCUCGU |
| 115 | UAUUGGGAGCUGUAUUUgGUUUCUCCUCGU |
| 116 | GUAUUGGGAGCUGUAUUUgGUUUCUCCUCGU |
| 117 | GGUAUUGGGAGCUGUAUUUgGUUUCUCCUCGU |
| 118 | UGGUAUUGGGAGCUGUAUUUgGUUUCUCCUCGU |
| 119 | UCCUGGUAUUGGGAGCUGUAUUUgGUUUCUCCUCGU |
| 120 | AUCCUGGUAUUGGGAGCUGUAUUUgGUUUCUCCUCGU |
| 121 | UgGUUUCUCCUCGUAUGGCCCCAU |
| 122 | UUgGUUUCUCCUCGUAUGGCCCCAU |
| 123 | UUUgGUUUCUCCUCGUAUGGuCCCAU |
| 124 | UUUgGUUUCUCCUCGUAUGGgCCCAU |
| 125 | UUUgGUUUCUCCUCGUAUGGCCCCAU |
| 126 | UUUgGUUUCUCCUCGUAUGGaCCCAU |
| 127 | AUUUgGUUUCUCCUCGUAUGGCCCCAU |
| 128 | UAUUUgGUUUCUCCUCGUAUGGCCCCAU |
| 129 | GUAUUUgGUUUCUCCUCGUAUGGuCCCAU |
| 130 | GUAUUUgGUUUCUCCUCGUAUGGgCCCAU |
| 131 | GUAUUUgGUUUCUCCUCGUAUGGCCCCAU |
| 132 | GUAUUUgGUUUCUCCUCGUAUGGaCCCAU |
| 133 | UGUAUUUgGUUUCUCCUCGUAUGGCCCCAU |
| 134 | GCUGUAUUUgGUUUCUCCUCGUAUGGCCCCAU |
| 135 | AGCUGUAUUUgGUUUCUCCUCGUAUGGuCCCAU |
| 136 | AGCUGUAUUUgGUUUCUCCUCGUAUGGgCCCAU |
| 137 | AGCUGUAUUUgGUUUCUCCUCGUAUGGCCCCAU |
| 138 | AGCUGUAUUUgGUUUCUCCUCGUAUGGaCCCAU |
| 139 | GAGCUGUAUUUgGUUUCUCCUCGUAUGGCCCCAU |
| 140 | GGAGCUGUAUUUgGUUUCUCCUCGUAUGGCCCCAU |
| 141 | GGGAGCUGUAUUUgGUUUCUCCUCGUAUGGuCCCAU |
| 142 | GGGAGCUGUAUUUgGUUUCUCCUCGUAUGGgCCCAU |
| 143 | GGGAGCUGUAUUUgGUUUCUCCUCGUAUGGCCCCAU |
| 144 | GGGAGCUGUAUUUgGUUUCUCCUCGUAUGGaCCCAU |
| 145 | UGGGAGCUGUAUUUgGUUUCUCCUCGUAUGGCCCCAU |
| 146 | UgGUUUCUCCUCGUAUGGCCCCAUU |
| 147 | UUgGUUUCUCCUCGUAUGGCCCCAUU |
| 148 | UUUgGUUUCUCCUCGUAUGGCCCCAUU |
| 149 | AUUUgGUUUCUCCUCGUAUGGCCCCAUU |
| 150 | UAUUUgGUUUCUCCUCGUAUGGCCCCAUU |
| 151 | GUAUUUgGUUUCUCCUCGUAUGGCCCCAUU |
| 152 | UGUAUUUgGUUUCUCCUCGUAUGGCCCCAUU |
| 153 | GCUGUAUUUgGUUUCUCCUCGUAUGGCCCCAUU |
| 154 | AGCUGUAUUUgGUUUCUCCUCGUAUGGCCCCAUU |
| 155 | GAGCUGUAUUUgGUUUCUCCUCGUAUGGCCCCAUU |
| 156 | GGAGCUGUAUUUgGUUUCUCCUCGUAUGGCCCCAUU |
| 157 | GGGAGCUGUAUUUgGUUUCUCCUCGUAUGGCCCCAUU |
| 158 | UgGUUUCUCCUCGUAUGGCCCCAUUG |
| 159 | UUgGUUUCUCCUCGUAUGGCCCCAUUG |
| 160 | UUUgGUUUCUCCUCGUAUGGCCCCAUUG |
| 161 | AUUUgGUUUCUCCUCGUAUGGCCCCAUUG |
| 162 | UAUUUgGUUUCUCCUCGUAUGGCCCCAUUG |
| 163 | GUAUUUgGUUUCUCCUCGUAUGGCCCCAUUG |
| 164 | UGUAUUUgGUUUCUCCUCGUAUGGCCCCAUUG |
| 165 | GCUGUAUUUgGUUUCUCCUCGUAUGGCCCCAUUG |
| 166 | AGCUGUAUUUgGUUUCUCCUCGUAUGGCCCCAUUG |
| 167 | GAGCUGUAUUUgGUUUCUCCUCGUAUGGCCCCAUUG |
| 168 | GGAGCUGUAUUUgGUUUCUCCUCGUAUGGCCCCAUUG |
| 169 | UgGUUUCUCCUCGUAUGGCCCCAUUGCCCUGU |
| 170 | UUgGUUUCUCCUCGUAUGGCCCCAUUGCCCUGU |
| 171 | UUUgGUUUCUCCUCGUAUGGCCCCAUUGCCCUGU |
| 172 | AUUUgGUUUCUCCUCGUAUGGCCCCAUUGCCCUGU |
| 173 | UAUUUgGUUUCUCCUCGUAUGGCCCCAUUGCCCUGU |
| 174 | GUAUUUgGUUUCUCCUCGUAUGGCCCCAUUGCCCUGU |
| 175 | UgGUUUCUCCUCGUAUGGCCCCAUUGCCCUGUU |
| 176 | UUgGUUUCUCCUCGUAUGGCCCCAUUGCCCUGUU |
| 177 | UUUgGUUUCUCCUCGUAUGGCCCCAUUGCCCUGUU |
| 178 | AUUUgGUUUCUCCUCGUAUGGCCCCAUUGCCCUGUU |
| 179 | UAUUUgGUUUCUCCUCGUAUGGCCCCAUUGCCCUGUU |
| 180 | ACCAAAUACAGCUCCCAAU |
| 181 | AACCAAAUACAGCUCCCAAU |
| 182 | AAACCAAAUACAGCUCCCAAU |
| 183 | GAAACCAAAUACAGCUCCCAAU |
| 184 | AGAAACCAAAUACAGCUCCCAAU |
| 185 | GAGAAACCAAAUACAGCUCCCAAU |
| 186 | GGAGAAACCAAAUACAGCUCCCAAU |
| 187 | AGGAGAAACCAAAUACAGCUCCCAAU |
| 188 | GAGGAGAAACcAAAUACAGCUCCCAAU |
| 189 | ACGAGGAGAAACCAAAUACAGCUCCCAAU |
| 190 | UACGAGGAGAAACCAAAUACAGCUCCCAAU |
| 191 | AUACGAGGAGAAACCAAAUACAGCUCCCAAU |
| 192 | GCCAUACGAGGAGAAACCAAAUACAGCUCCCAAU |
| 193 | GGCCAUACGAGGAGAAACCAAAUACAGCUCCCAAU |
| 194 | GGGCCAUACGAGGAGAAACCAAAUACAGCUCCCAAU |
| 195 | GGGGCCAUACGAGGAGAAACcAAAUACAGCUCCCAAU |
| 196 | ACcAAAUACAGCUCCCAAUA |
| 197 | AACCAAAUACAGCUCCCAAUA |
| 198 | AAACCAAAUACAGCUCCCAAUA |
| 199 | AAACCAAAUACAGCUCCuAAUA |
| 200 | AAACCAAAUACAGCUCCgAAUA |
| 201 | AAACCAAAUACAGCUCCaAAUA |
| 202 | GAAACCAAAUACAGCUCCCAAUA |
| 203 | AGAAACCAAAUACAGCUCCCAAUA |
| 204 | AGAAACCAAAUACAGCUCCuAAUA |
| 205 | AGAAACCAAAUACAGCUCCgAAUA |
| 206 | AGAAACCAAAUACAGCUCCaAAUA |
| 207 | GAGAAACCAAAUACAGCUCCCAAUA |
| 208 | GGAGAAACCAAAUACAGCUCCCAAUA |
| 209 | GGAGAAACCAAAUACAGCUCCuAAUA |
| 210 | GGAGAAACCAAAUACAGCUCCgAAUA |
| 211 | GGAGAAACCAAAUACAGCUCCaAAUA |
| 212 | AGGAGAAACCAAAUACAGCUCCCAAUA |
| 213 | GAGGAGAAACCAAAUACAGCUCCCAAUA |
| 214 | GAGGAGAAACCAAAUACAGCUCCuAAUA |
| 215 | GAGGAGAAACCAAAUACAGCUCCgAAUA |
| 216 | GAGGAGAAACCAAAUACAGCUCCaAAUA |
| 217 | ACGAGGAGAAACCAAAUACAGCUCCCAAUA |
| 218 | UACGAGGAGAAACCAAAUACAGCUCCCAAUA |
| 219 | UACGAGGAGAAACCAAAUACAGCUCCuAAUA |
| 220 | UACGAGGAGAAACCAAAUACAGCUCCgAAUA |
| 221 | UACGAGGAGAAACCAAAUACAGCUCCaAAUA |
| 222 | AUACGAGGAGAAACCAAAUACAGCUCCCAAUA |
| 223 | GCCAUACGAGGAGAAACCAAAUACAGCUCCCAAUA |
| 224 | GGCCAUACGAGGAGAAACCAAAUACAGCUCCCAAUA |
| 225 | GGGCCAUACGAGGAGAAACcAAAUACAGCUCCCAAUA |
| 226 | ACCAAAUACAGCUCCCAAUACCAGGA |
| 227 | AACCAAAUACAGCUCCCAAUACCAGGA |
| 228 | AAACCAAAUACAGCUCCCAAUACCAGGA |
| 229 | GAAACCAAAUACAGCUCCCAAUACCAGGA |
| 230 | AGAAACCAAAUACAGCUCCCAAUACCAGGA |
| 231 | GAGAAACCAAAUACAGCUCCCAAUACCAGGA |
| 232 | GGAGAAACCAAAUACAGCUCCCAAUACCAGGA |
| 233 | AGGAGAAACCAAAUACAGCUCCCAAUACCAGGA |
| 234 | GAGGAGAAACCAAAUACAGCUCCCAAUACCAGGA |
| 235 | ACGAGGAGAAACCAAAUACAGCUCCCAAUACCAGGA |
| 236 | UACGAGGAGAAACCAAAUACAGCUCCCAAUACCAGGA |
| 237 | ACCAAAUACAGCUCCCAAUACCAGGAUCCAGAG |
| 238 | AACCAAAUACAGCUCCCAAUACCAGGAUCCAGAG |
| 239 | AAACCAAAUACAGCUCCCAAUACCAGGAUCCAGAG |
| 240 | GAAACCAAAUACAGCUCCCAAUACCAGGAUCCAGAG |
| 241 | AGAAACCAAAUACAGCUCCCAAUACCAGGAUCCAGAG |
| | AUGGCCC (SEQ REF NO: 242) |
| | AUGGCCCC (SEQ REF NO: 243) |
| | AUGGCCCCA (SEQ REF NO: 244) |
| 245 | AUGGCCCCAU |
| 246 | AUGGCCCCAUU |
| 247 | AUGGCCCCAUUG |
| 248 | AUGGCCCCAUUGC |
| 249 | AUGGCCCCAUUGCC |
| 250 | AUGGCCCCAUUGCCC |
| | UGCCCUG (SEQ REF NO: 251) |
| | UGCCCUGU (SEQ REF NO: 252) |
| | UGCCCUGUU (SEQ REF NO: 253) |
| 254 | UGCCCUGUUU |
| 255 | UGCCCUGUUUG |
| 256 | UGCCCUGUUUGG |
| 257 | UGCCCUGUUUGGA |
| 258 | UGCCCUGUUUGGAG |
| 259 | UGCCCUGUUUGGAGU |
| | GCCCUGU (SEQ REF NO: 260) |
| | GCCCUGUU (SEQ REF NO: 261) |
| | GCCCUGUUU (SEQ REF NO: 262) |
| 263 | GCCCUGUUUG |
| 264 | GCCCUGUUUGG |
| 265 | GCCCUGUUUGGA |
| 266 | GCCCUGUUUGGAG |
| 267 | GCCCUGUUUGGAGU |
| 268 | GCCCUGUUUGGAGUC |
| | CCCUGUU (SEQ REF NO: 269) |
| | CCCUGUUU (SEQ REF NO: 270) |
| | CCCUGUUUG (SEQ REF NO: 271) |
| 272 | CCCUGUUUGG |
| 273 | CCCUGUUUGGA |
| 274 | CCCUGUUUGGAG |
| 275 | CCCUGUUUGGAGU |
| 276 | CCCUGUUUGGAGUC |
| 277 | CCCUGUUUGGAGUCA |
| | UUGGAGU (SEQ REF NO: 243) |
| | UUGGAGUC (SEQ REF NO: 243) |
| | UUGGAGUCA (SEQ REF NO: 243) |
| 281 | UUGGAGUCAU |
| 282 | UUGGAGUCAUA |
| 283 | UUGGAGUCAUAG |
| 284 | UUGGAGUCAUAGC |
| 285 | UUGGAGUCAUAGCC |
| 286 | UUGGAGUCAUAGCCA |
| | UGGAGUC (SEQ REF NO: 287) |
| | UGGAGUCA (SEQ REF NO: 288) |
| | UGGAGUCAU (SEQ REF NO: 289) |
| 290 | UGGAGUCAUA |
| 291 | UGGAGUCAUAG |
| 292 | UGGAGUCAUAGC |
| 293 | UGGAGUCAUAGCC |
| 294 | UGGAGUCAUAGCCA |
| 295 | UGGAGUCAUAGCCAA |
| | ACCAGGA (SEQ REF NO: 296) |
| | ACCAGGAU (SEQ REF NO: 297) |
| | ACCAGGAUC (SEQ REF NO: 298) |
| 299 | ACCAGGAUCC |
| 300 | ACCAGGAUCCA |
| 301 | ACCAGGAUCCAG |
| 302 | ACCAGGAUCCAGA |
| 303 | ACCAGGAUCCAGAG |
| 304 | ACCAGGAUCCAGAGC |
| | CCAGGAU (SEQ REF NO: 305) |
| | CCAGGAUC (SEQ REF NO: 306) |
| | CCAGGAUCC (SEQ REF NO: 307) |
| 308 | CCAGGAUCCA |
| 309 | CCAGGAUCCAG |
| 310 | CCAGGAUCCAGA |
| 311 | CCAGGAUCCAGAG |
| 312 | CCAGGAUCCAGAGC |
| 313 | CCAGGAUCCAGAGCU |
| | UCCAGAG (SEQ REF NO: 314) |
| | UCCAGAGC (SEQ REF NO: 315) |
| | UCCAGAGCU (SEQ REF NO: 316) |
| 317 | UCCAGAGCUG |
| 318 | UCCAGAGCUGC |
| 319 | UCCAGAGCUGCC |
| 320 | UCCAGAGCUGCCA |
| 321 | UCCAGAGCUGCCAA |
| 322 | UCCAGAGCUGCCAAG |
| | CUGCCAA (SEQ REF NO: 323) |
| | CUGCCAAG (SEQ REF NO: 324) |
| | CUGCCAAGG (SEQ REF NO: 325) |
| 326 | CUGCCAAGGG |
| 327 | CUGCCAAGGGC |
| 328 | CUGCCAAGGGCA |
| 329 | CUGCCAAGGGCAG |
| 330 | CUGCCAAGGGCAGA |
| 331 | CUGCCAAGGGCAGAG |
| 332 | AUUGUGGGACUCAUGGCCAA |
| 333 | CCACGCCAUUGUGGGACUCA |
| 334 | GGCACCUCCCACGCCAUUGU |
| 335 | UGGCACCUCCCACGCCAUUG |
| 336 | AGUGCCCCUCCCAACUUGUG |
| 337 | UAUGGCCCCAUUGCCCUGUU |
| 338 | GUAUUUgGUUUCUCCUCGUA |
| 339 | CAGCUCUGGAUCCUGGUAUU |
| 340 | GCAGCUCUGGAUCCUGGUAU |
| 341 | CCCUUGGCAGCUCUGGAUCC |
| 342 | CACUCUGCCCUUGGCAGCUC |
| 343 | AUGCCACUCCACUCUGCCCU |
| 344 | GCAGGGGUGGGUAGGCAGGU |
| 345 | UUUGGCAGGGGUGGGUAGGC |
| 346 | UUGCUUUGGCAGGGGUGGGU |
| 347 | CUUCUUGCUUUGGCAGGGGU |
| 348 | AUUGGCCAUGAGUCCCACAA |
| 349 | CCAUGAGUCCCACAAUGGCG |
| 350 | CAUGAGUCCCACAAUGGCGU |
| 351 | GAGUCCCACAAUGGCGUGGG |
| 352 | GUGGGAGGUGCCACACAAGU |
| 353 | UGGGAGGUGCCACACAAGUU |
| 354 | GAGGUGCCACACAAGUUGGG |
| 355 | AGGUGCCACACAAGUUGGGA |
| 356 | GGUGCCACACAAGUUGGGAG |
| 357 | GUUGGGAGGGGCACUCUCGU |
| 358 | CGUUGGCUAUGACUCCAAAC |
| 359 | GUUGGCUAUGACUCCAAACA |
| 360 | UAUGACUCCAAACAGGGCAA |
| 361 | AUGACUCCAAACAGGGCAAU |
| 362 | UGACUCCAAACAGGGCAAUG |
| 363 | CAGGGCAAUGGGGCCAUACG |
| 364 | CAAAUACAGCUCCCAAUACC |
| 365 | ACCAGGAUCCAGAGCUGCCA |
| 366 | CCAGGAUCCAGAGCUGCCAA |
| 367 | CAGAGCUGCCAAGGGCAGAG |
| 368 | CUGCCAAGGGCAGAGUGGAG |
| 369 | AGUGGAGUGGCAUUCAGAGU |
| 370 | CCCCUGCCAAAGCAAGAAGA |
| 3001 | GAAACCAAAUACAGCUCCUAAUA |
| 3001 | GGAGCUGUAUUUgGUUUCUCCUCGUAUGGCCCCAUUG |
| 3002 | GAAACCAAAUACAGCUCCGAGUA |
| 3003 | GAAACCAAAUACAGCUCCGAGUA |
| 3003 | UGUAUUUGGUUUCUCAUCGU |
| 3004 | GAAACCAAAUACAGCUCCCAAUA |
| 3004 | UGUAUUUGGUUUCUCCUCGUAUGGGCCCAU |
| 3005 | GAAACCAAAUACAGCUCCAAGUA |
| 3005 | GGAGCUGUAUUUGGUUUCUCCUCGUAUGGACCCAU |
| 3006 | GAGAAACCAAAUACAGCUCCUAAUA |
| 3007 | GAGAAACCAAAUACAGCUCCGAGUA |
| 3008 | GAGAAACCAAAUACAGCUCCAAGUA |
| 3009 | AGGAGAAACCAAAUACAGCUCCUAAUA |
| 3010 | AGGAGAAACCAAAUACAGCUCCGAGUA |
| 3011 | AGGAGAAACCAAAUACAGCUCCAAGUA |
| 3012 | UAUUUgGUUUCUcguCGU |
| 3013 | UAUUUGGUUUCUCAUCGU |
| 3014 | UAUUUgGUUUCUcuuCGU |
| 3016 | GUAUUUgGUUUCUcguCGU |
| 3017 | GUAUUUGGUUUCUCAUCGU |
| 3018 | UGUAUUUgGUUUCUcuuCGU |
| 3019 | UGUAUUUgGUUUCUcguCGU |
| 3020 | UGUAUUUGGUUUCUCAUCGU |
| 3021 | CUGUAUUUgGUUUCUcuuCGU |
| 3022 | CUGUAUUUgGUUUCUcguCGU |
| 3023 | CUGUAUUUGGUUUCUCCUCGU |
| 3024 | CUGUAUUUGGUUUCUCAUCGU |
| 3025 | GCUGUAUUUgGUUUCUcuuCGU |
| 3026 | GCUGUAUUUgGUUUCUcguCGU |
| 3027 | GCUGUAUUUGGUUUCUCAUCGU |
| 3028 | AGCUGUAUUUgGUUUCUcuuCGU |
| 3029 | AGCUGUAUUUgGUUUCUcguCGU |
| 3030 | AGCUGUAUUUGGUUUCUCAUCGU |
| 3035 | UAUUUGGUUUCUCCUCGUAUGGUCCCAU |
| 3036 | UAUUUGGUUUCUCCUCGUAUGGGCCCAU |
| 3037 | UAUUUGGUUUCUCCUCGUAUGGCCCCAU |
| 3038 | UAUUUGGUUUCUCCUCGUAUGGACCCAU |
| 3039 | GUAUUUGGUUUCUCCUCGUAUGGUCCCAU |
| 3040 | GUAUUUGGUUUCUCCUCGUAUGGGCCCAU |
| 3041 | GUAUUUGGUUUCUCCUCGUAUGGCCCCAU |
| 3042 | GUAUUUGGUUUCUCCUCGUAUGGACCCAU |
| 3043 | UGUAUUUGGUUUCUCCUCGUAUGGUCCCAU |
| 3044 | UGUAUUUGGUUUCUCCUCGUAUGGGCCCAU |
| 3045 | UGUAUUUGGUUUCUCCUCGUAUGGCCCCAU |
| 3046 | UGUAUUUGGUUUCUCCUCGUAUGGACCCAU |
| 3047 | CUGUAUUUGGUUUCUCCUCGUAUGGUCCCAU |
| 3048 | CUGUAUUUGGUUUCUCCUCGUAUGGGCCCAU |
| 3049 | CUGUAUUUGGUUUCUCCUCGUAUGGCCCCAU |
| 3050 | CUGUAUUUGGUUUCUCCUCGUAUGGACCCAU |
| 3051 | CUGUAUUUgGUUUCUCCUCGUAUGGCCCCAU |
| 3052 | GCUGUAUUUGGUUUCUCCUCGUAUGGUCCCAU |
| 3053 | GCUGUAUUUGGUUUCUCCUCGUAUGGGCCCAU |
| 3054 | GCUGUAUUUGGUUUCUCCUCGUAUGGCCCCAU |
| 3055 | GCUGUAUUUGGUUUCUCCUCGUAUGGACCCAU |
| 3056 | AGCUGUAUUUGGUUUCUCCUCGUAUGGUCCCAU |
| 3057 | AGCUGUAUUUGGUUUCUCCUCGUAUGGGCCCAU |
| 3058 | AGCUGUAUUUGGUUUCUCCUCGUAUGGCCCCAU |
| 3059 | AGCUGUAUUUGGUUUCUCCUCGUAUGGACCCAU |
| 3060 | GAGCUGUAUUUGGUUUCUCCUCGUAUGGUCCCAU |
| 3061 | GAGCUGUAUUUGGUUUCUCCUCGUAUGGGCCCAU |
| 3062 | GAGCUGUAUUUGGUUUCUCCUCGUAUGGCCCCAU |
| 3063 | GAGCUGUAUUUGGUUUCUCCUCGUAUGGACCCAU |
| 3064 | GGAGCUGUAUUUGGUUUCUCCUCGUAUGGUCCCAU |
| 3065 | GGAGCUGUAUUUGGUUUCUCCUCGUAUGGGCCCAU |
| 3066 | GGAGCUGUAUUUGGUUUCUCCUCGUAUGGCCCCAU |
| 3067 | GGAGCUGUAUUUGGUUUCUCCUCGUAUGGACCCAU |
| 3068 | GGGAGCUGUAUUUGGUUUCUCCUCGUAUGGUCCCAU |
| 3069 | GGGAGCUGUAUUUGGUUUCUCCUCGUAUGGGCCCAU |
| 3070 | GGGAGCUGUAUUUGGUUUCUCCUCGUAUGGCCCCAU |
| 3071 | GGGAGCUGUAUUUGGUUUCUCCUCGUAUGGACCCAU |
| 3101 | CUGUAUUUgGUUUCUCCUCGU |
| 5001 | GUAUUUGGUUUCUCAUCGUA |
| 5002 | GUAUUUGGUUUCUCGUCGUA |
| 5003 | GUAUUUGGUUUCUCUUCGUA |
| 5004 | UAUGGUCCCAUUGCCCUGUU |
| 5005 | UAUGGGCCCAUUGCCCUGUU |
| 5006 | UAUGGACCCAUUGCCCUGUU |
| 5007 | UAUGGCCCUAUUGCCCUGUU |
| 5008 | UAUGGCCCGAUUGCCCUGUU |
| 5009 | UAUGGCCCAAUUGCCCUGUU |
| 5010 | UAUGGCCCCAUUGCUCUGUU |
| 5011 | UAUGGCCCCAUUGCACUGUU |
| 5012 | UAUGGCCCCAUUGCGCUGUU |
| 5013 | ACCAAGCCUUCUUCUUGCUU |
| 5014 | AGCCUUCUUCUUGCUUUGGC |
| 5015 | GCCUUCUUCUUGCUUUGGCA |
| 5016 | CCUUCUUCUUGCUUUGGCAG |
| 5017 | UCUUCUUGCUUUGGCAGGGG |
| 5018 | CUAGGAUCCAGAGCUGCCAA |
| 5019 | CAAGGAUCCAGAGCUGCCAA |
| 5020 | CGAGGAUCCAGAGCUGCCAA |
| 5021 | ACUAGGAUCCAGAGCUGCCA |
| 5022 | ACAAGGAUCCAGAGCUGCCA |
| 5023 | ACGAGGAUCCAGAGCUGCCA |
| 5024 | UGACUCCAAACAGAGCAAUG |
| 5025 | UGACUCCAAACAGUGCAAUG |
| 5026 | UGACUCCAAACAGCGCAAUG |
| 5027 | AUGACUCCAAACAGAGCAAU |
| 5028 | AUGACUCCAAACAGUGCAAU |
| 5029 | AUGACUCCAAACAGCGCAAU |
| 5030 | CAAAUACAGCUCCUAAUACC |
| 5030 | GCCAAAGCAAGAAGAAGGCU |
| 5031 | CAAAUACAGCUCCGAAUACC |
| 5032 | CAAAUACAGCUCCAAAUACC |
| 5033 | CAAAUACAGCUCCCAAUACU |
| 5034 | CAAAUACAGCUCCCAAUACG |
| 5035 | CAAAUACAGCUCCCAAUACA |

TABLE 19a
Exemplary RTT sequences for Spacer S11

| SEQ REF | | SEQ REF | |
|---|---|---|---|
| NO: | Sequence | NO: | Sequence |
| 6090 | UGCCcuGUUU | 6111 | UGGCCCCAUUGCacuGUUU |
| 6091 | UGCacuGUUU | 6112 | UGGCCCCAUUGCgcuGUUU |
| 6092 | UGCgcuGUUU | 6113 | UGGCCCCAUUGCucuGUUU |
| 6093 | UGCucuGUUU | 6114 | AUGGCCCCAUUGCCcuGUUU |
| 6094 | UUGCCcuGUUU | 6115 | AUGGCCCCAUUGCacuGUUU |
| 6095 | UUGCacuGUUU | 6116 | AUGGCCCCAUUGCgcuGUUU |
| 6096 | UUGCgcuGUUU | 6117 | AUGGCCCCAUUGCucuGUUU |
| 6097 | UUGCucuGUUU | 6118 | UAUGGCCCCAUUGCCcuGUUU |
| 6098 | AUUGCCcuGUUU | 6119 | GUAUGGCCCCAUUGCCcuGUUU |
| 6099 | AUUGCacuGUUU | 407 | UCGUAUGGCCCCAUUGCCcuGUUU |
| 6100 | AUUGCgcuGUUU | 408 | UCCUCGUAUGGCCCCAUUGCCcuGUU |
| | | | U |
| 6101 | AUUGCucuGUUU | 409 | UCUCCUCGUAUGGCCCCAUUGCCcuG |
| | | | UUU |
| 6102 | GCCCCAUUGCCcuGUUU | 410 | UUCUCCUCGUAUGGCCCCAUUGCCcu |
| | | | GUUU |
| 6103 | GCCCCAUUGCacuGUUU | 411 | UUUCUCCUCGUAUGGCCCCAUUGCCC |
| | | | uGUUU |
| 6104 | GCCCCAUUGCgcuGUUU | 412 | GUUUCUCCUCGUAUGGCCCCAUUGCC |
| | | | cuGUUU |
| 6105 | GCCCCAUUGCucuGUUU | 413 | GGUUUCUCCUCGUAUGGCCCCAUUGC |
| | | | CcuGUUU |
| 6106 | GGCCCCAUUGCCcuGUUU | 414 | UGGUUUCUCCUCGUAUGGCCCCAUUG |
| | | | CCcuGUUU |
| 6107 | GGCCCCAUUGCacuGUUU | 415 | UUGGUUUCUCCUCGUAUGGCCCCAUU |
| | | | GCCcuGUUU |
| 6108 | GGCCCCAUUGCgcuGUUU | 416 | UUUGGUUUCUCCUCGUAUGGCCCCAU |
| | | | UGCCcuGUUU |
| 6109 | GGCCCCAUUGCucuGUUU | 417 | AUUUGGUUUCUCCUCGUAUGGCCCCA |
| | | | UUGCCcuGUUU |
| 6110 | UGGCCCCAUUGCCcuGUUU | 6012 | CCCAUUGCgcuGUUU |
| 6005 | CAUUGCucuGUUU | 6013 | CCCAUUGCacuGUUU |
| 6006 | CAUUGCgcuGUUU | 6020 | CCCAUUGCCcuGUUU |
| 6007 | CAUUGCacuGUUU | 6014 | CCCCAUUGCucuGUUU |
| 6018 | CAUUGCCcuGUUU | 6015 | CCCCAUUGCgcuGUUU |
| 6008 | CCAUUGCucuGUUU | 6016 | CCCCAUUGCacuGUUU |
| 6009 | CCAUUGCgcuGUUU | 6017 | CCCCAUUGCCcuGUUU |
| 6010 | CCAUUGCacuGUUU | | |
| 6019 | CCAUUGCCcuGUUU | | |

TABLE 19b
Exemplary PBS sequences for Spacer S11

| | Sequence |
|---|---|
| SEQ REF NO: 467 | GGAGUCA |
| SEQ REF NO: 468 | GGAGUCAU |
| SEQ REF NO: 469 | GGAGUCAUA |
| SEQ ID NO: 470 | GGAGUCAUAG |
| SEQ ID NO: 471 | GGAGUCAUAGC |
| SEQ ID NO: 472 | GGAGUCAUAGCC |
| SEQ ID NO: 473 | GGAGUCAUAGCCA |
| SEQ ID NO: 474 | GGAGUCAUAGCCAA |
| SEQ ID NO: 475 | GGAGUCAUAGCCAAC |

TABLE 19c
Exemplary RTT/PBS Combinations with Spacer S11

| PEG# | RTT | PBS |
|---|---|---|
| 1704 | 377 | 467 |
| 1713 | 381 | 467 |
| 1722 | 385 | 467 |
| 1731 | 389 | 467 |
| 1740 | 393 | 467 |
| 1749 | 397 | 467 |
| 1758 | 401 | 467 |
| 1767 | 405 | 467 |
| 1776 | 406 | 467 |
| 1785 | 407 | 467 |
| 1794 | 408 | 467 |
| 1803 | 409 | 467 |
| 1812 | 410 | 467 |
| 1821 | 411 | 467 |
| 1830 | 412 | 467 |
| 1839 | 413 | 467 |
| 1848 | 414 | 467 |
| 1857 | 415 | 467 |
| 1866 | 416 | 467 |
| 1875 | 417 | 467 |
| 1974 | 380 | 468 |
| 2030 | 379 | 468 |
| 2002 | 378 | 468 |
| 1705 | 377 | 468 |
| 1978 | 384 | 468 |
| 2034 | 383 | 468 |
| 2006 | 382 | 468 |
| 1714 | 381 | 468 |
| 1982 | 388 | 468 |
| 2038 | 387 | 468 |
| 2010 | 386 | 468 |
| 1723 | 385 | 468 |
| 1986 | 392 | 468 |
| 2042 | 391 | 468 |
| 2014 | 390 | 468 |
| 1732 | 389 | 468 |
| 1990 | 396 | 468 |
| 2046 | 395 | 468 |
| 2018 | 394 | 468 |
| 1741 | 393 | 468 |
| 1994 | 400 | 468 |
| 2050 | 399 | 468 |
| 2022 | 398 | 468 |
| 1750 | 397 | 468 |
| 1998 | 404 | 468 |
| 2054 | 403 | 468 |
| 2026 | 402 | 468 |
| 1759 | 401 | 468 |
| 1768 | 405 | 468 |
| 1777 | 406 | 468 |
| 1786 | 407 | 468 |
| 1795 | 408 | 468 |
| 1804 | 409 | 468 |
| 1813 | 410 | 468 |
| 1822 | 411 | 468 |
| 1831 | 412 | 468 |
| 1840 | 413 | 468 |
| 1849 | 414 | 468 |
| 1858 | 415 | 468 |
| 1867 | 416 | 468 |
| 1876 | 417 | 468 |
| 1706 | 377 | 469 |
| 1715 | 381 | 469 |
| 1724 | 385 | 469 |
| 1733 | 389 | 469 |
| 1742 | 393 | 469 |
| 1751 | 397 | 469 |
| 1760 | 401 | 469 |
| 1769 | 405 | 469 |
| 1778 | 406 | 469 |
| 1787 | 407 | 469 |
| 1796 | 408 | 469 |
| 1805 | 409 | 469 |
| 1814 | 410 | 469 |
| 1823 | 411 | 469 |
| 1832 | 412 | 469 |
| 1841 | 413 | 469 |
| 1850 | 414 | 469 |
| 1859 | 415 | 469 |
| 1868 | 416 | 469 |
| 1877 | 417 | 469 |
| 1975 | 380 | 470 |
| 2031 | 379 | 470 |
| 2003 | 378 | 470 |
| 1707 | 377 | 470 |
| 1979 | 384 | 470 |
| 2035 | 383 | 470 |
| 2007 | 382 | 470 |
| 1716 | 381 | 470 |
| 1983 | 388 | 470 |
| 2039 | 387 | 470 |
| 2011 | 386 | 470 |
| 1725 | 385 | 470 |
| 1987 | 392 | 470 |
| 2043 | 391 | 470 |
| 2015 | 390 | 470 |
| 1734 | 389 | 470 |
| 1991 | 396 | 470 |
| 2047 | 395 | 470 |
| 2019 | 394 | 470 |
| 1743 | 393 | 470 |
| 1995 | 400 | 470 |
| 2051 | 399 | 470 |
| 2023 | 398 | 470 |
| 1752 | 397 | 470 |
| 1999 | 404 | 470 |
| 2055 | 403 | 470 |
| 2027 | 402 | 470 |
| 1761 | 401 | 470 |
| 1770 | 405 | 470 |
| 1779 | 406 | 470 |
| 1788 | 407 | 470 |
| 1797 | 408 | 470 |
| 1806 | 409 | 470 |
| 1815 | 410 | 470 |
| 1824 | 411 | 470 |
| 1833 | 412 | 470 |
| 1842 | 413 | 470 |
| 1851 | 414 | 470 |
| 1860 | 415 | 470 |
| 1869 | 416 | 470 |
| 1878 | 417 | 470 |
| 1708 | 377 | 471 |
| 1717 | 381 | 471 |
| 2429 | 388 | 471 |
| 2430 | 387 | 471 |
| 2431 | 386 | 471 |
| 1726 | 385 | 471 |
| 2432 | 6005 | 471 |
| 2433 | 6006 | 471 |
| 2434 | 6007 | 471 |
| 2435 | 6008 | 471 |
| 2436 | 6009 | 471 |
| 2437 | 6010 | 471 |
| 2438 | 6011 | 471 |
| 2439 | 6012 | 471 |
| 2440 | 6013 | 471 |
| 2441 | 6014 | 471 |
| 2442 | 6015 | 471 |
| 2443 | 6016 | 471 |
| 2444 | 392 | 471 |
| 2445 | 391 | 471 |
| 2446 | 390 | 471 |
| 1735 | 389 | 471 |
| 2447 | 396 | 471 |
| 2448 | 395 | 471 |
| 2449 | 394 | 471 |
| 1744 | 393 | 471 |
| 2450 | 400 | 471 |
| 2451 | 399 | 471 |
| 2452 | 398 | 471 |
| 1753 | 397 | 471 |
| 1762 | 401 | 471 |
| 1771 | 405 | 471 |
| 1780 | 406 | 471 |
| 1789 | 407 | 471 |
| 1798 | 408 | 471 |
| 1807 | 409 | 471 |
| 1816 | 410 | 471 |
| 1825 | 411 | 471 |
| 1834 | 412 | 471 |
| 1843 | 413 | 471 |
| 1852 | 414 | 471 |
| 1861 | 415 | 471 |
| 1870 | 416 | 471 |
| 1879 | 417 | 471 |
| 1976 | 380 | 472 |
| 2032 | 379 | 472 |
| 2004 | 378 | 472 |
| 1709 | 377 | 472 |
| 1980 | 384 | 472 |
| 2036 | 383 | 472 |
| 2008 | 382 | 472 |
| 1718 | 381 | 472 |
| 1984 | 388 | 472 |
| 2040 | 387 | 472 |
| 2012 | 386 | 472 |
| 1727 | 385 | 472 |
| 2453 | 6005 | 472 |
| 2454 | 6006 | 472 |
| 2455 | 6007 | 472 |
| 2538 | 6018 | 472 |
| 2456 | 6008 | 472 |
| 2457 | 6009 | 472 |
| 2458 | 6010 | 472 |
| 2459 | 6011 | 472 |
| 2460 | 6012 | 472 |
| 2461 | 6013 | 472 |
| 2462 | 6014 | 472 |
| 2463 | 6015 | 472 |
| 2464 | 6016 | 472 |
| 2465 | 6017 | 472 |
| 1988 | 392 | 472 |
| 2044 | 391 | 472 |
| 2016 | 390 | 472 |
| 1736 | 389 | 472 |
| 1992 | 396 | 472 |
| 2048 | 395 | 472 |
| 2020 | 394 | 472 |
| 1745 | 393 | 472 |
| 1996 | 400 | 472 |
| 2052 | 399 | 472 |
| 2024 | 398 | 472 |
| 1754 | 397 | 472 |
| 2000 | 404 | 472 |
| 2056 | 403 | 472 |
| 2028 | 402 | 472 |
| 1763 | 401 | 472 |
| 1772 | 405 | 472 |
| 1781 | 406 | 472 |
| 1790 | 407 | 472 |
| 1799 | 408 | 472 |
| 1808 | 409 | 472 |
| 1817 | 410 | 472 |
| 1826 | 411 | 472 |
| 1835 | 412 | 472 |
| 1844 | 413 | 472 |
| 1853 | 414 | 472 |
| 1862 | 415 | 472 |
| 1871 | 416 | 472 |
| 1880 | 417 | 472 |
| 1710 | 377 | 473 |
| 1719 | 381 | 473 |
| 2466 | 388 | 473 |
| 2467 | 387 | 473 |
| 2468 | 386 | 473 |
| 1728 | 385 | 473 |
| 2469 | 6005 | 473 |
| 2470 | 6006 | 473 |
| 2471 | 6007 | 473 |
| 2472 | 6018 | 473 |
| 2473 | 6008 | 473 |
| 2474 | 6009 | 473 |
| 2475 | 6010 | 473 |
| 2476 | 6019 | 473 |
| 2477 | 6011 | 473 |
| 2478 | 6012 | 473 |
| 2479 | 6013 | 473 |
| 2480 | 6020 | 473 |
| 2481 | 6014 | 473 |
| 2482 | 6015 | 473 |
| 2483 | 6016 | 473 |
| 2484 | 6017 | 473 |
| 2485 | 392 | 473 |
| 2486 | 391 | 473 |
| 2487 | 390 | 473 |
| 1737 | 389 | 473 |
| 2488 | 396 | 473 |
| 2489 | 395 | 473 |
| 2490 | 394 | 473 |
| 1746 | 393 | 473 |
| 2491 | 400 | 473 |
| 2492 | 399 | 473 |
| 2493 | 398 | 473 |
| 1755 | 397 | 473 |
| 1764 | 401 | 473 |
| 1773 | 405 | 473 |
| 1782 | 406 | 473 |
| 1791 | 407 | 473 |
| 1800 | 408 | 473 |
| 1809 | 409 | 473 |
| 1818 | 410 | 473 |
| 1827 | 411 | 473 |
| 1836 | 412 | 473 |
| 1845 | 413 | 473 |
| 1854 | 414 | 473 |
| 1863 | 415 | 473 |
| 1872 | 416 | 473 |
| 1881 | 417 | 473 |
| 1977 | 380 | 474 |
| 2033 | 379 | 474 |
| 2005 | 378 | 474 |
| 1711 | 377 | 474 |
| 1981 | 384 | 474 |
| 2037 | 383 | 474 |
| 2009 | 382 | 474 |
| 1720 | 381 | 474 |
| 1985 | 388 | 474 |
| 2041 | 387 | 474 |
| 2013 | 386 | 474 |
| 1729 | 385 | 474 |
| 2494 | 6005 | 474 |
| 2495 | 6006 | 474 |
| 2496 | 6007 | 474 |
| 2497 | 6018 | 474 |
| 2498 | 6008 | 474 |
| 2499 | 6009 | 474 |
| 2500 | 6010 | 474 |
| 2501 | 6019 | 474 |
| 2502 | 6011 | 474 |
| 2503 | 6012 | 474 |
| 2504 | 6013 | 474 |
| 2505 | 6020 | 474 |
| 2506 | 6014 | 474 |
| 2507 | 6015 | 474 |
| 2508 | 6016 | 474 |
| 2509 | 6017 | 474 |
| 1989 | 392 | 474 |
| 2045 | 391 | 474 |
| 2017 | 390 | 474 |
| 1738 | 389 | 474 |
| 1993 | 396 | 474 |
| 2049 | 395 | 474 |
| 2021 | 394 | 474 |
| 1747 | 393 | 474 |
| 1997 | 400 | 474 |
| 2053 | 399 | 474 |
| 2025 | 398 | 474 |
| 1756 | 397 | 474 |
| 2001 | 404 | 474 |
| 2057 | 403 | 474 |
| 2029 | 402 | 474 |
| 1765 | 401 | 474 |
| 1774 | 405 | 474 |
| 1783 | 406 | 474 |
| 1792 | 407 | 474 |
| 1801 | 408 | 474 |
| 1810 | 409 | 474 |
| 1819 | 410 | 474 |
| 1828 | 411 | 474 |
| 1837 | 412 | 474 |
| 1846 | 413 | 474 |
| 1855 | 414 | 474 |
| 1864 | 415 | 474 |
| 1873 | 416 | 474 |
| 1882 | 417 | 474 |
| 1712 | 377 | 475 |
| 1721 | 381 | 475 |
| 2510 | 388 | 475 |
| 2511 | 387 | 475 |
| 2512 | 386 | 475 |
| 1730 | 385 | 475 |
| 2513 | 6005 | 475 |
| 2514 | 6006 | 475 |
| 2515 | 6007 | 475 |
| 2516 | 6018 | 475 |
| 2517 | 6008 | 475 |
| 2518 | 6009 | 475 |
| 2519 | 6010 | 475 |
| 2520 | 6019 | 475 |
| 2521 | 6011 | 475 |
| 2522 | 6012 | 475 |
| 2523 | 6013 | 475 |
| 2524 | 6020 | 475 |
| 2525 | 6014 | 475 |
| 2526 | 6015 | 475 |
| 2527 | 6016 | 475 |
| 2528 | 6017 | 475 |
| 2529 | 392 | 475 |
| 2530 | 391 | 475 |
| 2531 | 390 | 475 |
| 1739 | 389 | 475 |
| 2532 | 396 | 475 |
| 2533 | 395 | 475 |
| 2534 | 394 | 475 |
| 1748 | 393 | 475 |
| 2535 | 400 | 475 |
| 2536 | 399 | 475 |
| 2537 | 398 | 475 |
| 1757 | 397 | 475 |
| 1766 | 401 | 475 |
| 1775 | 405 | 475 |
| 1784 | 406 | 475 |
| 1793 | 407 | 475 |
| 1802 | 408 | 475 |
| 1811 | 409 | 475 |
| 1820 | 410 | 475 |
| 1829 | 411 | 475 |
| 1838 | 412 | 475 |
| 1847 | 413 | 475 |
| 1856 | 414 | 475 |
| 1865 | 415 | 475 |
| 1874 | 416 | 475 |
| 1883 | 417 | 475 |

TABLE 20a
Exemplary RTT sequences for Spacer S12

| SEQ ID NO: | Sequence |
|---|---|
| 418 | GCCcuGUUUGGAGUCAUAG |
| | CCAACG |
| 419 | UGCCcuGUUUGGAGUCAUA |
| | GCCAACG |
| 420 | UUGCCcuGUUUGGAGUCAU |
| | AGCCAACG |
| 421 | AUUGCCcuGUUUGGAGUCA |
| | UAGCCAACG |
| 422 | GCCCCAUUGCCcuGUUUGG |
| | AGUCAUAGCCAACG |
| 423 | GGCCCCAUUGCCcuGUUUGGAG |
| | UCAUAGCCAACG |
| 424 | UGGCCCCAUUGCCcuGUUUGGA |
| | GUCAUAGCCAACG |
| 425 | AUGGCCCCAUUGCCcuGUUUGG |
| | AGUCAUAGCCAACG |
| 426 | UAUGGCCCCAUUGCCcuGUUUG |
| | GAGUCAUAGCCAACG |

TABLE 20b
Exemplary PBS sequences for Spacer S12

| | Sequence |
|---|---|
| SEQ REF NO: 476 | AGAGUGC |
| SEQ REF NO: 477 | AGAGUGCC |
| SEQ REF NO: 478 | AGAGUGCCC |
| SEQ ID NO: 479 | AGAGUGCCCC |
| SEQ ID NO: 480 | AGAGUGCCCCU |
| SEQ ID NO: 481 | AGAGUGCCCCUC |
| SEQ ID NO: 482 | AGAGUGCCCCUCC |
| SEQ ID NO: 483 | AGAGUGCCCCUCCC |
| SEQ ID NO: 484 | AGAGUGCCCCUCCCA |

TABLE 20c
Exemplary RTT/PBS Combinations with Spacer S12

| PEG # | RTT | PBS |
|---|---|---|
| 1884 | 418 | 476 |
| 1893 | 419 | 476 |
| 1902 | 420 | 476 |
| 1911 | 421 | 476 |
| 1920 | 422 | 476 |
| 1929 | 423 | 476 |
| 1938 | 424 | 476 |
| 1947 | 425 | 476 |
| 1956 | 426 | 476 |
| 1885 | 418 | 477 |
| 1894 | 419 | 477 |
| 1903 | 420 | 477 |
| 1912 | 421 | 477 |
| 1921 | 422 | 477 |
| 1930 | 423 | 477 |
| 1939 | 424 | 477 |
| 1948 | 425 | 477 |
| 1957 | 426 | 477 |
| 1886 | 418 | 478 |
| 1895 | 419 | 478 |
| 1904 | 420 | 478 |
| 1913 | 421 | 478 |
| 1922 | 422 | 478 |
| 1931 | 423 | 478 |
| 1940 | 424 | 478 |
| 1949 | 425 | 478 |
| 1958 | 426 | 478 |
| 1887 | 418 | 479 |
| 1896 | 419 | 479 |
| 1905 | 420 | 479 |
| 1914 | 421 | 479 |
| 1923 | 422 | 479 |
| 1932 | 423 | 479 |
| 1941 | 424 | 479 |
| 1950 | 425 | 479 |
| 1959 | 426 | 479 |
| 1888 | 418 | 480 |
| 1897 | 419 | 480 |
| 1906 | 420 | 480 |
| 1915 | 421 | 480 |
| 1924 | 422 | 480 |
| 1933 | 423 | 480 |
| 1942 | 424 | 480 |
| 1951 | 425 | 480 |
| 1960 | 426 | 480 |
| 1889 | 418 | 481 |
| 1898 | 419 | 481 |
| 1907 | 420 | 481 |
| 1916 | 421 | 481 |
| 1925 | 422 | 481 |
| 1934 | 423 | 481 |
| 1943 | 424 | 481 |
| 1952 | 425 | 481 |
| 1961 | 426 | 481 |
| 1890 | 418 | 482 |
| 1899 | 419 | 482 |
| 1908 | 420 | 482 |
| 1917 | 421 | 482 |
| 1926 | 422 | 482 |
| 1935 | 423 | 482 |
| 1944 | 424 | 482 |
| 1953 | 425 | 482 |
| 1962 | 426 | 482 |
| 1891 | 418 | 483 |
| 1900 | 419 | 483 |
| 1909 | 420 | 483 |
| 1918 | 421 | 483 |
| 1927 | 422 | 483 |
| 1936 | 423 | 483 |
| 1945 | 424 | 483 |
| 1954 | 425 | 483 |
| 1963 | 426 | 483 |
| 1892 | 418 | 484 |
| 1901 | 419 | 484 |
| 1910 | 420 | 484 |
| 1919 | 421 | 484 |
| 1928 | 422 | 484 |
| 1937 | 423 | 484 |
| 1946 | 424 | 484 |
| 1955 | 425 | 484 |
| 1964 | 426 | 484 |

TABLE 21a
Exemplary RTT sequence for Spacer S13

| SEQ | |
|---|---|
| ID NO: | Sequence |
| 427 | GCCcuGUUUGGAGUCAUAGCCAACGAGAGUGCCCCUC |

TABLE 21b
Exemplary PBS sequences for Spacer S13

| | Sequence |
|---|---|
| SEQ REF NO: 485 | CCAACUU |
| SEQ REF NO: 486 | CCAACUUG |
| SEQ REF NO: 487 | CCAACUUGU |
| SEQ ID NO: 488 | CCAACUUGUG |
| SEQ ID NO: 489 | CCAACUUGUGU |
| SEQ ID NO: 490 | CCAACUUGUGUG |
| SEQ ID NO: 491 | CCAACUUGUGUGG |
| SEQ ID NO: 492 | CCAACUUGUGUGGC |
| SEQ ID NO: 493 | CCAACUUGUGUGGCA |

TABLE 21c
Exemplary RTT/PBS Combinations with Spacer S13

| PEG # | RTT | PBS |
|---|---|---|
| 1965 | 427 | 485 |
| 1966 | 427 | 486 |
| 1967 | 427 | 487 |
| 1968 | 427 | 488 |
| 1969 | 427 | 489 |
| 1970 | 427 | 490 |
| 1971 | 427 | 491 |
| 1972 | 427 | 492 |
| 1973 | 427 | 493 |

TABLE 22a
Exemplary RTT sequences for Spacer S14

| SEQ ID NO: | Sequence | SEQ ID NO: | Sequence |
|---|---|---|---|
| 428 | ACUCCAAACag | 439 | UCUCGUUGGCUAUGACUCCAAACag |
| 429 | GACUCCAAACag | 440 | ACUCUCGUUGGCUAUGACUCCAAACag |
| 430 | UGACUCCAAACag | 441 | GCACUCUCGUUGGCUAUGACUCCAAAC |
| | | | ag |
| 431 | AUGACUCCAAACag | 442 | GGCACUCUCGUUGGCUAUGACUCCAAA |
| | | | Cag |
| 432 | UAUGACUCCAAACag | 443 | GGGCACUCUCGUUGGCUAUGACUCCAA |
| | | | ACag |
| 433 | GCUAUGACUCCAAACag | 444 | GGGGCACUCUCGUUGGCUAUGACUCCA |
| | | | AACag |
| 434 | GGCUAUGACUCCAAACag | 445 | AGGGGCACUCUCGUUGGCUAUGACUCC |
| | | | AAACag |
| 435 | UGGCUAUGACUCCAAACag | 446 | GAGGGGCACUCUCGUUGGCUAUGACUC |
| | | | CAAACag |
| 436 | UUGGCUAUGACUCCAAACa | 447 | GGAGGGGCACUCUCGUUGGCUAUGACU |
| | g | | CCAAACag |
| 437 | GUUGGCUAUGACUCCAAAC | 448 | GGGAGGGGCACUCUCGUUGGCUAUGAC |
| | ag | | UCCAAACag |
| 438 | UCGUUGGCUAUGACUCCAA | 449 | UGGGAGGGGCACUCUCGUUGGCUAUGA |
| | ACag | | CUCCAAACag |
| 6001 | CUAUGACUCCAAACag | | |

TABLE 22b
Exemplary PBS sequences for Spacer S14

| | Sequence |
|---|---|
| SEQ REF NO: 494 | GGCAAUG |
| SEQ REF NO: 495 | GGCAAUGG |
| SEQ REF NO: 496 | GGCAAUGGG |
| SEQ ID NO: 497 | GGCAAUGGGG |
| SEQ ID NO: 498 | GGCAAUGGGGC |
| SEQ ID NO: 499 | GGCAAUGGGGCC |
| SEQ ID NO: 500 | GGCAAUGGGGCCA |
| SEQ ID NO: 501 | GGCAAUGGGGCCAU |
| SEQ ID NO: 502 | GGCAAUGGGGCCAUA |

TABLE 22c
Exemplary RTT/PBS Combinations with Spacer S14

| PEG # | RTT | PBS |
|---|---|---|
| 2058 | 428 | 494 |
| 2067 | 429 | 494 |
| 2076 | 430 | 494 |
| 2085 | 431 | 494 |
| 2094 | 432 | 494 |
| 2103 | 433 | 494 |
| 2112 | 434 | 494 |
| 2121 | 435 | 494 |
| 2130 | 436 | 494 |
| 2139 | 437 | 494 |
| 2148 | 438 | 494 |
| 2157 | 439 | 494 |
| 2166 | 440 | 494 |
| 2175 | 441 | 494 |
| 2184 | 442 | 494 |
| 2193 | 443 | 494 |
| 2202 | 444 | 494 |
| 2211 | 445 | 494 |
| 2220 | 446 | 494 |
| 2229 | 447 | 494 |
| 2238 | 448 | 494 |
| 2247 | 449 | 494 |
| 2059 | 428 | 495 |
| 2068 | 429 | 495 |
| 2077 | 430 | 495 |
| 2086 | 431 | 495 |
| 2095 | 432 | 495 |
| 2104 | 433 | 495 |
| 2113 | 434 | 495 |
| 2122 | 435 | 495 |
| 2131 | 436 | 495 |
| 2140 | 437 | 495 |
| 2149 | 438 | 495 |
| 2158 | 439 | 495 |
| 2167 | 440 | 495 |
| 2176 | 441 | 495 |
| 2185 | 442 | 495 |
| 2194 | 443 | 495 |
| 2203 | 444 | 495 |
| 2212 | 445 | 495 |
| 2221 | 446 | 495 |
| 2230 | 447 | 495 |
| 2239 | 448 | 495 |
| 2248 | 449 | 495 |
| 2060 | 428 | 496 |
| 2069 | 429 | 496 |
| 2078 | 430 | 496 |
| 2087 | 431 | 496 |
| 2096 | 432 | 496 |
| 2105 | 433 | 496 |
| 2114 | 434 | 496 |
| 2123 | 435 | 496 |
| 2132 | 436 | 496 |
| 2141 | 437 | 496 |
| 2150 | 438 | 496 |
| 2159 | 439 | 496 |
| 2168 | 440 | 496 |
| 2177 | 441 | 496 |
| 2186 | 442 | 496 |
| 2195 | 443 | 496 |
| 2204 | 444 | 496 |
| 2213 | 445 | 496 |
| 2222 | 446 | 496 |
| 2231 | 447 | 496 |
| 2240 | 448 | 496 |
| 2249 | 449 | 496 |
| 2061 | 428 | 497 |
| 2070 | 429 | 497 |
| 2079 | 430 | 497 |
| 2088 | 431 | 497 |
| 2097 | 432 | 497 |
| 2409 | 6001 | 497 |
| 2106 | 433 | 497 |
| 2115 | 434 | 497 |
| 2124 | 435 | 497 |
| 2133 | 436 | 497 |
| 2142 | 437 | 497 |
| 2151 | 438 | 497 |
| 2160 | 439 | 497 |
| 2169 | 440 | 497 |
| 2178 | 441 | 497 |
| 2187 | 442 | 497 |
| 2196 | 443 | 497 |
| 2205 | 444 | 497 |
| 2214 | 445 | 497 |
| 2223 | 446 | 497 |
| 2232 | 447 | 497 |
| 2241 | 448 | 497 |
| 2250 | 449 | 497 |
| 2062 | 428 | 498 |
| 2071 | 429 | 498 |
| 2080 | 430 | 498 |
| 2089 | 431 | 498 |
| 2098 | 432 | 498 |
| 2410 | 6001 | 498 |
| 2107 | 433 | 498 |
| 2116 | 434 | 498 |
| 2125 | 435 | 498 |
| 2134 | 436 | 498 |
| 2143 | 437 | 498 |
| 2152 | 438 | 498 |
| 2161 | 439 | 498 |
| 2170 | 440 | 498 |
| 2179 | 441 | 498 |
| 2188 | 442 | 498 |
| 2197 | 443 | 498 |
| 2206 | 444 | 498 |
| 2215 | 445 | 498 |
| 2224 | 446 | 498 |
| 2233 | 447 | 498 |
| 2242 | 448 | 498 |
| 2251 | 449 | 498 |
| 2063 | 428 | 499 |
| 2072 | 429 | 499 |
| 2081 | 430 | 499 |
| 2090 | 431 | 499 |
| 2099 | 432 | 499 |
| 2411 | 6001 | 499 |
| 2108 | 433 | 499 |
| 2117 | 434 | 499 |
| 2126 | 435 | 499 |
| 2135 | 436 | 499 |
| 2144 | 437 | 499 |
| 2153 | 438 | 499 |
| 2162 | 439 | 499 |
| 2171 | 440 | 499 |
| 2180 | 441 | 499 |
| 2189 | 442 | 499 |
| 2198 | 443 | 499 |
| 2207 | 444 | 499 |
| 2216 | 445 | 499 |
| 2225 | 446 | 499 |
| 2234 | 447 | 499 |
| 2243 | 448 | 499 |
| 2252 | 449 | 499 |
| 2064 | 428 | 500 |
| 2073 | 429 | 500 |
| 2082 | 430 | 500 |
| 2091 | 431 | 500 |
| 2100 | 432 | 500 |
| 2412 | 6001 | 500 |
| 2109 | 433 | 500 |
| 2118 | 434 | 500 |
| 2127 | 435 | 500 |
| 2136 | 436 | 500 |
| 2145 | 437 | 500 |
| 2154 | 438 | 500 |
| 2163 | 439 | 500 |
| 2172 | 440 | 500 |
| 2181 | 441 | 500 |
| 2190 | 442 | 500 |
| 2199 | 443 | 500 |
| 2208 | 444 | 500 |
| 2217 | 445 | 500 |
| 2226 | 446 | 500 |
| 2235 | 447 | 500 |
| 2244 | 448 | 500 |
| 2253 | 449 | 500 |
| 2065 | 428 | 501 |
| 2074 | 429 | 501 |
| 2083 | 430 | 501 |
| 2092 | 431 | 501 |
| 2101 | 432 | 501 |
| 2413 | 6001 | 501 |
| 2110 | 433 | 501 |
| 2119 | 434 | 501 |
| 2128 | 435 | 501 |
| 2137 | 436 | 501 |
| 2146 | 437 | 501 |
| 2155 | 438 | 501 |
| 2164 | 439 | 501 |
| 2173 | 440 | 501 |
| 2182 | 441 | 501 |
| 2191 | 442 | 501 |
| 2200 | 443 | 501 |
| 2209 | 444 | 501 |
| 2218 | 445 | 501 |
| 2227 | 446 | 501 |
| 2236 | 447 | 501 |
| 2245 | 448 | 501 |
| 2254 | 449 | 501 |
| 2066 | 428 | 502 |
| 2075 | 429 | 502 |
| 2084 | 430 | 502 |
| 2093 | 431 | 502 |
| 2102 | 432 | 502 |
| 2111 | 433 | 502 |
| 2120 | 434 | 502 |
| 2129 | 435 | 502 |
| 2138 | 436 | 502 |
| 2147 | 437 | 502 |
| 2156 | 438 | 502 |
| 2165 | 439 | 502 |
| 2174 | 440 | 502 |
| 2183 | 441 | 502 |
| 2192 | 442 | 502 |
| 2201 | 443 | 502 |
| 2210 | 444 | 502 |
| 2219 | 445 | 502 |
| 2228 | 446 | 502 |
| 2237 | 447 | 502 |
| 2246 | 448 | 502 |
| 2255 | 449 | 502 |

TABLE 23a
Exemplary RTT sequences for Spacer S15

| SEQ ID NO: | Sequence | SEQ ID NO: | Sequence |
|---|---|---|---|
| 450 | ACagGGCAAUGGGGCCAUA | 457 | AUGACUCCAAACagGGCAAUGGGGC |
| | C | | CAUAC |
| 451 | AACagGGCAAUGGGGCCAU | 458 | UAUGACUCCAAACagGGCAAUGGGG |
| | AC | | CCAUAC |
| 452 | AAACagGGCAAUGGGGCCA | 459 | GCUAUGACUCCAAACagGGCAAUGG |
| | UAC | | GGCCAUAC |
| 453 | UCCAAACagGGCAAUGGGG | 460 | GGCUAUGACUCCAAACagGGCAAUG |
| | CCAUAC | | GGGCCAUAC |
| 454 | ACUCCAAACagGGCAAUGG | 461 | UGGCUAUGACUCCAAACagGGCAAU |
| | GGCCAUAC | | GGGGCCAUAC |
| 455 | GACUCCAAACagGGCAAUG | 462 | UUGGCUAUGACUCCAAACagGGCAA |
| | GGGCCAUAC | | UGGGGCCAUAC |
| 456 | UGACUCCAAACagGGCAAU | 463 | GUUGGCUAUGACUCCAAACagGGCA |
| | GGGGCCAUAC | | AUGGGGCCAUAC |
| 6003 | CCAAACagGGCAAUGGGGC | 6004 | CUCCAAACagGGCAAUGGGGCCAUA |
| | CAUAC | | C |

TABLE 23b
Exemplary PBS sequences for Spacer S15

| | Sequence |
|---|---|
| SEQ REF NO: 503 | GAGGAGA |
| SEQ REF NO: 504 | GAGGAGAA |
| SEQ REF NO: 505 | GAGGAGAAA |
| SEQ ID NO: 506 | GAGGAGAAAC |
| SEQ ID NO: 507 | GAGGAGAAACC |
| SEQ ID NO: 508 | GAGGAGAAACCA |
| SEQ ID NO: 509 | GAGGAGAAACCAA |
| SEQ ID NO: 510 | GAGGAGAAACCAAA |
| SEQ ID NO: 511 | GAGGAGAAACCAAAU |

TABLE 23c
Exemplary RTT/PBS Combinations with Spacer S15

| PEG # | RTT | PBS |
|---|---|---|
| 2256 | 450 | 503 |
| 2265 | 451 | 503 |
| 2274 | 452 | 503 |
| 2283 | 453 | 503 |
| 2292 | 454 | 503 |
| 2301 | 455 | 503 |
| 2310 | 456 | 503 |
| 2319 | 457 | 503 |
| 2328 | 458 | 503 |
| 2337 | 459 | 503 |
| 2346 | 460 | 503 |
| 2355 | 461 | 503 |
| 2364 | 462 | 503 |
| 2373 | 463 | 503 |
| 2257 | 450 | 504 |
| 2266 | 451 | 504 |
| 2275 | 452 | 504 |
| 2284 | 453 | 504 |
| 2293 | 454 | 504 |
| 2302 | 455 | 504 |
| 2311 | 456 | 504 |
| 2320 | 457 | 504 |
| 2329 | 458 | 504 |
| 2338 | 459 | 504 |
| 2347 | 460 | 504 |
| 2356 | 461 | 504 |
| 2365 | 462 | 504 |
| 2374 | 463 | 504 |
| 2258 | 450 | 505 |
| 2267 | 451 | 505 |
| 2276 | 452 | 505 |
| 2422 | 6003 | 505 |
| 2285 | 453 | 505 |
| 2423 | 453 | 505 |
| 2424 | 6004 | 505 |
| 2294 | 454 | 505 |
| 2425 | 454 | 505 |
| 2303 | 455 | 505 |
| 2426 | 455 | 505 |
| 2312 | 456 | 505 |
| 2427 | 456 | 505 |
| 2321 | 457 | 505 |
| 2428 | 457 | 505 |
| 2330 | 458 | 505 |
| 2339 | 459 | 505 |
| 2348 | 460 | 505 |
| 2357 | 461 | 505 |
| 2366 | 462 | 505 |
| 2375 | 463 | 505 |
| 2259 | 450 | 506 |
| 2268 | 451 | 506 |
| 2277 | 452 | 506 |
| 2414 | 6003 | 506 |
| 2286 | 453 | 506 |
| 2415 | 6004 | 506 |
| 2295 | 454 | 506 |
| 2304 | 455 | 506 |
| 2313 | 456 | 506 |
| 2322 | 457 | 506 |
| 2331 | 458 | 506 |
| 2340 | 459 | 506 |
| 2349 | 460 | 506 |
| 2358 | 461 | 506 |
| 2367 | 462 | 506 |
| 2376 | 463 | 506 |
| 2260 | 450 | 507 |
| 2269 | 451 | 507 |
| 2278 | 452 | 507 |
| 2416 | 6003 | 507 |
| 2287 | 453 | 507 |
| 2417 | 6004 | 507 |
| 2296 | 454 | 507 |
| 2305 | 455 | 507 |
| 2314 | 456 | 507 |
| 2323 | 457 | 507 |
| 2332 | 458 | 507 |
| 2341 | 459 | 507 |
| 2350 | 460 | 507 |
| 2359 | 461 | 507 |
| 2368 | 462 | 507 |
| 2377 | 463 | 507 |
| 2261 | 450 | 508 |
| 2270 | 451 | 508 |
| 2279 | 452 | 508 |
| 2418 | 6003 | 508 |
| 2288 | 453 | 508 |
| 2419 | 6004 | 508 |
| 2297 | 454 | 508 |
| 2306 | 455 | 508 |
| 2315 | 456 | 508 |
| 2324 | 457 | 508 |
| 2333 | 458 | 508 |
| 2342 | 459 | 508 |
| 2351 | 460 | 508 |
| 2360 | 461 | 508 |
| 2369 | 462 | 508 |
| 2378 | 463 | 508 |
| 2262 | 450 | 509 |
| 2271 | 451 | 509 |
| 2280 | 452 | 509 |
| 2420 | 6003 | 509 |
| 2289 | 453 | 509 |
| 2421 | 6004 | 509 |
| 2298 | 454 | 509 |
| 2307 | 455 | 509 |
| 2316 | 456 | 509 |
| 2325 | 457 | 509 |
| 2334 | 458 | 509 |
| 2343 | 459 | 509 |
| 2352 | 460 | 509 |
| 2361 | 461 | 509 |
| 2370 | 462 | 509 |
| 2379 | 463 | 509 |
| 2263 | 450 | 510 |
| 2272 | 451 | 510 |
| 2281 | 452 | 510 |
| 2290 | 453 | 510 |
| 2299 | 454 | 510 |
| 2308 | 455 | 510 |
| 2317 | 456 | 510 |
| 2326 | 457 | 510 |
| 2335 | 458 | 510 |
| 2344 | 459 | 510 |
| 2353 | 460 | 510 |
| 2362 | 461 | 510 |
| 2371 | 462 | 510 |
| 2380 | 463 | 510 |
| 2264 | 450 | 511 |
| 2273 | 451 | 511 |
| 2282 | 452 | 511 |
| 2291 | 453 | 511 |
| 2300 | 454 | 511 |
| 2309 | 455 | 511 |
| 2318 | 456 | 511 |
| 2327 | 457 | 511 |
| 2336 | 458 | 511 |
| 2345 | 459 | 511 |
| 2354 | 460 | 511 |
| 2363 | 461 | 511 |
| 2372 | 462 | 511 |
| 2381 | 463 | 511 |

TABLE 24a
Exemplary RTT sequences for Spacer S16

| SEQ ID NO: | Sequence |
|---|---|
| 464 | ACagGGCAAUGGGGCCAUA |
| | CGAGGAGAAACCAAAU |
| 465 | AACagGGCAAUGGGGCCAU |
| | ACGAGGAGAAACCAAAU |
| 466 | AAACagGGCAAUGGGGCCA |
| | UACGAGGAGAAACCAAAU |

TABLE 24b
Exemplary PBS sequences for Spacer S16

| | Sequence |
|---|---|
| SEQ REF NO: 512 | ACAGCUC |
| SEQ REF NO: 513 | ACAGCUCC |
| SEQ REF NO: 514 | ACAGCUCCC |
| SEQ ID NO: 515 | ACAGCUCCCA |
| SEQ ID NO: 516 | ACAGCUCCCAA |
| SEQ ID NO: 517 | ACAGCUCCCAAU |
| SEQ ID NO: 518 | ACAGCUCCCAAUA |
| SEQ ID NO: 519 | ACAGCUCCCAAUAC |
| SEQ ID NO: 520 | ACAGCUCCCAAUACC |

TABLE 24c
Exemplary RTT/PBS Combinations with Spacer S16

| PEG # | RTT | PBS |
|---|---|---|
| 2382 | 464 | 512 |
| 2391 | 465 | 512 |
| 2400 | 466 | 512 |
| 2383 | 464 | 513 |
| 2392 | 465 | 513 |
| 2401 | 466 | 513 |
| 2384 | 464 | 514 |
| 2393 | 465 | 514 |
| 2402 | 466 | 514 |
| 2385 | 464 | 515 |
| 2394 | 465 | 515 |
| 2403 | 466 | 515 |
| 2386 | 464 | 516 |
| 2395 | 465 | 516 |
| 2404 | 466 | 516 |
| 2387 | 464 | 517 |
| 2396 | 465 | 517 |
| 2405 | 466 | 517 |
| 2388 | 464 | 518 |
| 2397 | 465 | 518 |
| 2406 | 466 | 518 |
| 2389 | 464 | 519 |
| 2398 | 465 | 519 |
| 2407 | 466 | 519 |
| 2390 | 464 | 520 |
| 2399 | 465 | 520 |
| 2408 | 466 | 520 |

TABLE 24d
Correction of L348fs using PE2 systems, experiment 1.

| | First trial | | | | | | | |
|---|---|---|---|---|---|---|---|---|
| | Replicate A | | Replicate B | | Replicate C | | Second trial | |
| | edit | indel | edit | indel | edit | indel | edit | indel |
| Peg# | % | % | % | % | % | % | % | % |
| 2059 | 19.3% | 1.8% | 11.7% | 0.6% | 18.1% | 0.9% | 7.6% | 0.5% |
| 2068 | 20.4% | 1.3% | 10.2% | 0.6% | 14.8% | 0.7% | 8.2% | 0.5% |
| 2077 | 26.5% | 1.9% | 15.2% | 0.9% | 20.9% | 0.8% | 10.5% | 0.7% |
| 2086 | 22.6% | 1.3% | 20.7% | 1.7% | 18.4% | 1.4% | 11.5% | 0.5% |
| 2095 | 18.8% | 2.9% | 15.9% | 1.7% | 15.1% | 2.1% | 11.6% | 1.0% |
| 2104 | 16.1% | 2.5% | 12.9% | 1.5% | 11.6% | 1.8% | 11.9% | 1.0% |
| 2113 | 22.4% | 2.3% | 13.5% | 0.8% | 18.3% | 1.2% | 7.2% | 0.5% |
| 2061 | 41.8% | 2.1% | 24.4% | 1.0% | 34.5% | 1.7% | 12.7% | 0.6% |
| 2070 | 37.9% | 1.2% | 21.1% | 0.9% | 31.7% | 1.3% | 11.2% | 0.6% |
| 2079 | 40.4% | 1.9% | 21.8% | 1.3% | 33.4% | 1.7% | 11.7% | 0.7% |
| 2088 | 44.3% | 2.2% | 34.6% | 2.1% | 36.0% | 3.1% | 19.7% | 1.0% |
| 2097 | 43.1% | 2.8% | 21.3% | 2.1% | 36.7% | 2.9% | 19.5% | 1.3% |
| 2106 | 0.0% | 0.1% | 0.0% | 0.1% | 0.0% | 0.2% | 4.3% | 0.4% |
| 2115 | 40.2% | 3.4% | 23.8% | 1.7% | 32.6% | 3.0% | 14.3% | 0.6% |
| 2063 | 44.2% | 2.8% | 24.5% | 1.2% | 34.9% | 2.0% | 14.9% | 0.7% |
| 2072 | 40.2% | 1.6% | 22.2% | 1.0% | 33.7% | 1.8% | 12.7% | 0.7% |
| 2081 | 45.8% | 1.8% | 24.6% | 1.4% | 38.8% | 1.7% | 16.2% | 1.7% |
| 2090 | 48.5% | 2.4% | 35.9% | 3.3% | 44.3% | 3.2% | 20.7% | 1.2% |
| 2099 | 0.0% | 0.1% | 0.0% | 0.1% | 0.0% | 0.1% | 5.0% | 0.4% |
| 2108 | 45.5% | 5.7% | 30.8% | 2.5% | 35.6% | 4.5% | 16.2% | 1.6% |
| 2117 | 41.0% | 6.3% | 31.2% | 3.1% | 40.5% | 6.0% | 14.3% | 0.9% |
| 2065 | 43.1% | 3.0% | 22.5% | 1.3% | 38.4% | 2.0% | 13.1% | 0.6% |
| 2074 | 41.0% | 1.9% | 21.3% | 1.7% | 38.0% | 2.1% | 11.2% | 0.6% |
| 2083 | 43.7% | 1.9% | 23.0% | 1.2% | 38.8% | 1.7% | 15.2% | 0.8% |
| 2092 | 0.0% | 0.1% | 0.0% | 0.1% | 0.0% | 0.1% | 1.6% | 0.3% |
| 2101 | 49.1% | 2.4% | 30.5% | 1.6% | 41.5% | 2.2% | 17.5% | 0.9% |
| 2110 | 34.1% | 2.1% | 20.6% | 1.4% | 27.0% | 2.7% | 13.1% | 0.8% |
| 2119 | 39.1% | 3.7% | 28.7% | 2.3% | 35.4% | 5.4% | 14.0% | 0.9% |
| 2257 | 0.0% | 0.9% | 0.0% | 0.3% | 0.0% | 0.1% | 6.4% | 0.4% |
| 2284 | 8.3% | 0.4% | 2.7% | 0.4% | 6.3% | 0.4% | 2.3% | 0.3% |
| 2311 | 9.1% | 0.8% | 4.1% | 0.4% | 8.1% | 0.6% | 4.5% | 0.4% |
| 2338 | 7.7% | 0.9% | 3.5% | 0.3% | 7.7% | 0.6% | 6.4% | 0.4% |
| 2259 | 0.0% | 0.3% | 0.0% | 0.5% | 0.0% | 1.2% | 11.0% | 0.4% |
| 2286 | 18.7% | 1.3% | 6.6% | 0.3% | 13.8% | 0.8% | 6.0% | 0.4% |
| 2313 | 16.6% | 1.2% | 5.7% | 0.2% | 12.6% | 0.4% | 6.5% | 0.5% |
| 2340 | 11.2% | 0.7% | 4.1% | 0.4% | 8.4% | 0.4% | 6.7% | 0.3% |
| 2261 | 0.0% | 0.1% | 0.0% | 0.1% | 0.0% | 0.1% | 2.0% | 0.4% |
| 2288 | 0.0% | 0.1% | 0.0% | 0.1% | 0.0% | 0.1% | 3.2% | 0.3% |
| 2315 | 10.1% | 0.6% | 3.5% | 0.3% | 7.1% | 0.4% | 5.0% | 0.4% |
| 2342 | 13.1% | 1.2% | 3.8% | 0.3% | 7.1% | 0.8% | 5.3% | 0.4% |
| 2263 | 0.0% | 0.1% | 0.0% | 0.1% | 0.0% | 0.1% | 1.9% | 0.4% |
| 2290 | 7.0% | 0.1% | 1.7% | 0.2% | 6.6% | 0.3% | 5.1% | 0.3% |
| 2317 | 0.0% | 0.1% | 0.0% | 0.1% | 0.0% | 0.1% | 0.6% | 0.3% |
| 2344 | 5.3% | 0.3% | 2.4% | 0.4% | 4.8% | 0.4% | 3.6% | 0.4% |
| 1974 | 0.0% | 0.2% | 0.0% | 0.2% | 0.1% | 0.9% | 4.4% | 0.4% |
| 2030 | 0.0% | 0.1% | 0.0% | 0.3% | 0.1% | 0.1% | 7.4% | 0.3% |
| 2002 | 0.0% | 0.2% | 0.0% | 0.3% | 0.0% | 0.5% | 5.6% | 0.4% |
| 1705 | 0.2% | 0.7% | 0.2% | 0.2% | 0.3% | 0.1% | 8.0% | 0.3% |
| 1978 | 0.2% | 0.7% | 0.6% | 0.3% | 0.5% | 0.3% | 8.3% | 0.4% |
| 2034 | 0.6% | 0.8% | 0.2% | 0.4% | 0.3% | 0.5% | 7.9% | 0.3% |
| 2006 | 0.8% | 1.0% | 0.3% | 0.4% | 3.4% | 0.9% | 11.3% | 0.3% |
| 1714 | 0.7% | 0.1% | 0.7% | 0.3% | 0.9% | 0.6% | 4.0% | 0.4% |
| 1982 | 36.6% | 0.7% | 11.7% | 0.5% | 26.3% | 0.6% | 12.3% | 0.3% |
| 2038 | 26.7% | 0.6% | 9.9% | 0.5% | 23.2% | 0.4% | 3.4% | 0.4% |
| 2010 | 52.6% | 1.8% | 14.3% | 0.7% | 42.3% | 0.3% | 16.6% | 0.3% |
| 1723 | 7.2% | 0.3% | 6.7% | 0.8% | 9.2% | 0.3% | 6.3% | 0.3% |
| 1986 | 10.4% | 1.0% | 5.4% | 0.6% | 8.6% | 0.6% | 10.3% | 0.4% |
| 2042 | 24.1% | 0.2% | 6.0% | 0.4% | 14.9% | 0.5% | 5.7% | 0.4% |
| 2014 | 17.6% | 1.0% | 6.2% | 0.6% | 12.2% | 0.2% | 2.5% | 0.3% |
| 1732 | 0.9% | 0.1% | 2.0% | 0.2% | 1.2% | 0.9% | 4.0% | 0.4% |
| 1990 | 4.6% | 0.5% | 2.8% | 0.2% | 4.2% | 0.2% | 3.8% | 0.4% |
| 2046 | 22.1% | 0.7% | 5.8% | 0.3% | 11.4% | 0.2% | 6.4% | 0.4% |
| 2018 | 10.5% | 0.7% | 5.4% | 0.5% | 9.0% | 0.4% | 5.0% | 0.3% |
| 1741 | 3.3% | 1.4% | 2.5% | 0.7% | 2.3% | 1.0% | 9.7% | 0.3% |
| 1994 | 9.7% | 0.3% | 3.4% | 0.7% | 6.6% | 0.4% | 6.0% | 0.4% |
| 2050 | 17.4% | 0.5% | 11.3% | 0.5% | 12.7% | 0.3% | 4.7% | 0.4% |
| 2022 | 10.1% | 0.6% | 4.1% | 0.4% | 10.0% | 0.4% | 8.6% | 0.4% |
| 1750 | 1.9% | 0.5% | 1.6% | 0.4% | 2.1% | 0.3% | 1.2% | 0.4% |
| 1998 | 3.7% | 0.5% | 1.9% | 0.3% | 2.5% | 0.5% | 8.1% | 0.3% |
| 2054 | 10.2% | 0.7% | 5.0% | 0.4% | 7.7% | 0.6% | 7.4% | 0.5% |
| 2026 | 2.2% | 0.0% | 1.3% | 0.2% | 1.7% | 0.1% | 4.9% | 0.4% |
| 1759 | 2.1% | 0.7% | 1.1% | 0.6% | 1.8% | 0.3% | 4.0% | 0.4% |
| 1975 | 0.0% | 0.5% | 0.0% | 0.3% | 0.1% | 0.6% | 6.2% | 0.5% |
| 2031 | 0.0% | 0.5% | 0.0% | 0.5% | 0.0% | 0.5% | 8.7% | 0.3% |
| 2003 | 0.0% | 0.0% | 0.0% | 0.2% | 0.0% | 0.5% | 7.4% | 0.3% |
| 1707 | 0.2% | 0.1% | 0.0% | 0.1% | 0.1% | 0.1% | 2.5% | 0.4% |
| 1979 | 1.4% | 0.7% | 0.8% | 0.5% | 1.2% | 0.5% | 9.0% | 0.3% |
| 2035 | 0.1% | 0.1% | 0.0% | 0.3% | 0.1% | 0.4% | 7.5% | 0.4% |
| 2007 | 0.7% | 0.2% | 0.4% | 0.2% | 0.4% | 0.2% | 5.4% | 0.3% |
| 1716 | 1.2% | 0.8% | 1.4% | 0.4% | 1.2% | 0.6% | 4.2% | 0.3% |
| 1983 | 0.0% | 0.1% | 0.1% | 0.1% | 0.0% | 0.1% | 3.1% | 0.3% |
| 2039 | 38.9% | 2.2% | 15.3% | 0.5% | 34.5% | 1.1% | 7.5% | 0.4% |
| 2011 | 0.0% | 0.1% | 0.0% | 0.0% | 0.0% | 0.1% | 6.4% | 0.3% |
| 1725 | 0.2% | 0.1% | 0.0% | 0.1% | 0.0% | 0.1% | 0.1% | 0.4% |
| 1987 | 26.9% | 0.5% | 14.1% | 0.5% | 22.7% | 0.8% | 15.7% | 0.4% |
| 2043 | 28.3% | 0.7% | 9.4% | 0.6% | 22.1% | 0.6% | 8.8% | 0.4% |
| 2015 | 17.9% | 0.4% | 7.2% | 0.3% | 12.9% | 0.4% | 3.3% | 0.3% |
| 1734 | 3.0% | 0.5% | 2.1% | 0.2% | 3.4% | 0.6% | 7.1% | 0.3% |
| 1991 | 21.3% | 0.7% | 10.7% | 0.5% | 16.7% | 0.5% | 6.9% | 0.3% |
| 2047 | 0.0% | 0.1% | 0.0% | 0.1% | 0.0% | 0.1% | 3.1% | 0.4% |
| 2019 | 28.3% | 0.7% | 9.4% | 0.4% | 20.7% | 0.8% | 8.7% | 0.4% |
| 1743 | 0.0% | 0.1% | 0.0% | 0.1% | 0.0% | 0.1% | 5.4% | 0.3% |
| 1995 | 11.9% | 0.6% | 5.9% | 0.2% | 11.0% | 0.7% | 8.5% | 0.3% |
| 2051 | 35.5% | 1.3% | 18.3% | 0.8% | 31.3% | 0.6% | 12.0% | 0.6% |
| 2023 | 21.8% | 1.0% | 6.8% | 0.5% | 12.6% | 0.5% | 5.7% | 0.3% |
| 1752 | 9.9% | 2.6% | 6.1% | 1.3% | 8.3% | 3.5% | 4.7% | 0.4% |
| 1999 | 0.0% | 0.1% | 0.0% | 0.1% | 0.0% | 0.1% | 1.0% | 0.4% |
| 2055 | 15.7% | 0.4% | 9.1% | 0.6% | 11.2% | 0.4% | 7.5% | 0.4% |
| 2027 | 13.5% | 0.6% | 6.6% | 0.4% | 11.8% | 0.5% | 10.2% | 0.4% |
| 1761 | 5.7% | 0.4% | 3.8% | 0.4% | 3.8% | 0.6% | 6.7% | 0.3% |
| 1976 | 0.4% | 0.4% | 0.0% | 0.2% | 0.8% | 0.4% | 7.0% | 0.4% |
| 2032 | 0.0% | 0.1% | 0.0% | 0.1% | 0.0% | 0.1% | 5.3% | 0.3% |
| 2004 | 0.0% | 0.1% | 0.0% | 0.1% | 0.0% | 0.1% | 3.6% | 0.3% |
| 1709 | 0.0% | 1.0% | 0.1% | 0.3% | 0.0% | 0.4% | 6.1% | 0.4% |
| 1980 | 6.6% | 1.3% | 2.1% | 0.7% | 3.7% | 0.7% | 10.8% | 0.4% |
| 2036 | 0.0% | 0.2% | 0.0% | 0.1% | 0.0% | 0.1% | 4.0% | 0.3% |
| 2008 | 9.9% | 9.1% | 2.8% | 2.3% | 9.0% | 5.3% | 4.8% | 3.8% |
| 1718 | 4.4% | 0.8% | 2.3% | 0.3% | 5.0% | 0.9% | 6.9% | 0.4% |
| 1984 | 68.9% | 2.1% | 34.7% | 0.8% | 59.5% | 1.6% | 25.1% | 0.5% |
| 2040 | 58.8% | 0.8% | 25.4% | 0.6% | 52.3% | 0.7% | 14.4% | 0.4% |
| 2012 | 0.0% | 0.1% | 0.0% | 0.1% | 0.0% | 0.0% | 5.1% | 0.3% |
| 1727 | 46.4% | 1.4% | 34.6% | 0.9% | 43.6% | 0.7% | 18.9% | 0.4% |
| 1988 | 0.0% | 0.1% | 0.0% | 0.1% | 0.0% | 0.1% | 5.8% | 0.4% |
| 2044 | 67.0% | 1.3% | 32.8% | 1.1% | 61.6% | 0.8% | 17.8% | 0.6% |
| 2016 | 65.9% | 1.4% | 35.2% | 1.2% | 57.9% | 1.4% | 17.1% | 0.6% |
| 1736 | 33.6% | 1.5% | 23.6% | 0.7% | 28.4% | 2.0% | 12.4% | 0.3% |
| 1992 | 58.6% | 1.1% | 26.3% | 0.4% | 51.6% | 1.2% | 9.6% | 0.4% |
| 2048 | 59.2% | 1.2% | 17.1% | 0.6% | 46.9% | 1.2% | 12.2% | 0.5% |
| 2020 | 65.6% | 0.3% | 28.2% | 0.8% | 61.4% | 1.0% | 15.4% | 0.7% |
| 1745 | 22.6% | 0.9% | 18.9% | 0.8% | 20.4% | 0.8% | 11.4% | 0.5% |
| 1996 | 56.1% | 1.5% | 23.0% | 0.6% | 49.8% | 1.4% | 9.9% | 0.5% |
| 2052 | 0.0% | 0.1% | 0.0% | 0.1% | 0.0% | 0.1% | 3.9% | 0.4% |
| 2024 | 54.0% | 1.2% | 25.6% | 1.2% | 49.0% | 1.1% | 18.2% | 0.6% |
| 1754 | 0.2% | 0.1% | 0.1% | 0.2% | 0.2% | 0.2% | 2.5% | 0.4% |
| 2000 | 48.4% | 0.5% | 22.8% | 0.7% | 41.6% | 0.9% | 14.3% | 0.4% |
| 2056 | 46.5% | 1.3% | 19.8% | 0.7% | 39.3% | 0.7% | 12.0% | 0.4% |
| 2028 | 0.0% | 0.1% | 0.0% | 0.1% | 0.0% | 0.1% | 4.2% | 0.5% |
| 1763 | 27.1% | 1.2% | 17.7% | 0.9% | 25.0% | 2.5% | 11.7% | 0.6% |
| 1977 | 0.0% | 0.1% | 0.0% | 0.1% | 0.0% | 0.1% | 0.5% | 0.4% |
| 2033 | 0.1% | 1.7% | 0.0% | 2.2% | 0.1% | 2.5% | 3.1% | 0.5% |
| 2005 | 0.0% | 0.3% | 0.0% | 0.1% | 0.0% | 0.2% | 3.3% | 0.3% |
| 1711 | 0.2% | 0.4% | 0.0% | 0.4% | 0.0% | 0.6% | 5.1% | 0.4% |
| 1981 | 8.5% | 1.2% | 3.8% | 0.5% | 7.1% | 0.4% | 10.6% | 0.4% |
| 2037 | 0.0% | 0.1% | 0.0% | 0.1% | 0.0% | 0.1% | 5.4% | 0.3% |
| 2009 | 0.0% | 0.1% | 0.0% | 0.1% | 0.0% | 0.1% | 5.3% | 0.4% |
| 1720 | 2.7% | 1.1% | 2.2% | 0.4% | 2.5% | 0.7% | 4.7% | 0.4% |
| 1985 | 64.1% | 0.9% | 23.4% | 0.5% | 61.8% | 0.8% | 20.4% | 0.5% |
| 2041 | 67.0% | 1.4% | 26.8% | 0.8% | 56.4% | 0.9% | 17.0% | 0.5% |
| 2013 | 0.0% | 0.1% | 0.0% | 0.1% | 0.0% | 0.1% | 4.2% | 0.3% |
| 1729 | 49.2% | 1.5% | 33.3% | 0.9% | 43.6% | 1.2% | 19.5% | 0.5% |
| 1989 | 71.0% | 0.9% | 39.7% | 0.9% | 62.6% | 0.7% | 27.2% | 0.5% |
| 2045 | 66.3% | 0.9% | 29.6% | 0.6% | 61.3% | 0.8% | 17.6% | 0.5% |
| 2017 | 72.6% | 1.0% | 42.1% | 1.1% | 69.5% | 1.3% | 18.6% | 0.5% |
| 1738 | 0.0% | 0.2% | 0.0% | 0.1% | 0.0% | 0.1% | 1.3% | 0.3% |
| 1993 | 70.9% | 1.4% | 39.9% | 1.0% | 67.7% | 1.6% | 18.5% | 0.5% |
| 2049 | 0.0% | 0.1% | 0.0% | 0.1% | 0.0% | 0.1% | 0.7% | 0.3% |
| 2021 | 73.8% | 1.3% | 38.5% | 0.8% | 69.7% | 1.8% | 16.3% | 0.6% |
| 1747 | 0.0% | 0.1% | 0.0% | 0.1% | 0.0% | 0.1% | 5.2% | 0.3% |
| 1997 | 0.0% | 0.1% | 0.0% | 0.1% | 0.0% | 0.1% | −7.8% | 0.3% |
| 2053 | 70.4% | 2.3% | 35.2% | 1.4% | 59.7% | 1.7% | 21.1% | 0.6% |
| 2025 | 0.0% | 0.1% | 0.0% | 0.1% | 0.0% | 0.1% | 0.2% | 0.4% |
| 1756 | 39.6% | 2.3% | 24.2% | 0.8% | 33.3% | 1.6% | 12.3% | 0.5% |
| 2001 | 58.2% | 1.0% | 29.8% | 0.6% | 53.1% | 1.0% | 17.1% | 0.7% |
| 2057 | 0.0% | 0.1% | 0.0% | 0.1% | 0.0% | 0.1% | −0.2% | 0.5% |
| 2029 | 0.0% | 0.1% | 0.0% | 0.1% | 0.0% | 0.1% | 3.2% | 0.3% |
| 1765 | 37.3% | 2.2% | 25.8% | 0.6% | 35.7% | 2.2% | 15.0% | 0.6% |

TABLE 24e
Correction of L348fs using PE2 systems, experiment 2.

| PEG # | edit % | indel % | PEG # | edit % | indel % | PEG # | edit % | indel % | PEG # | edit % | indel % |
|---|---|---|---|---|---|---|---|---|---|---|---|
| 1728 | 35% | 1% | 2091 | 38% | 4% | 2321 | 7% | 1% | 2485 | 63% | 2% |
| 1729 | 41% | 1% | 2092 | 34% | 4% | 2429 | 47% | 1% | 2486 | 54% | 2% |
| 1730 | 38% | 1% | 2097 | 26% | 4% | 2430 | 24% | 1% | 2487 | 59% | 2% |
| 1736 | 29% | 1% | 2098 | 30% | 5% | 2431 | 47% | 1% | 2488 | 57% | 1% |
| 1737 | 31% | 2% | 2099 | 32% | 9% | 2432 | 43% | 1% | 2489 | 47% | 2% |
| 1738 | 23% | 1% | 2100 | 33% | 6% | 2433 | 41% | 1% | 2490 | 46% | 2% |
| 1739 | 30% | 2% | 2101 | 29% | 7% | 2434 | 43% | 1% | 2491 | 58% | 1% |
| 1745 | 20% | 2% | 2106 | 23% | 5% | 2435 | 40% | 1% | 2492 | 35% | 2% |
| 1746 | 22% | 2% | 2107 | 32% | 6% | 2436 | 40% | 1% | 2493 | 43% | 1% |
| 1747 | 24% | 2% | 2108 | 31% | 13% | 2437 | 38% | 1% | 2494 | 47% | 1% |
| 1748 | 31% | 2% | 2109 | 34% | 7% | 2438 | 38% | 1% | 2495 | 41% | 2% |
| 1754 | 18% | 2% | 2110 | 33% | 5% | 2439 | 47% | 2% | 2496 | 45% | 1% |
| 1756 | 21% | 2% | 2115 | 22% | 4% | 2440 | 42% | 1% | 2497 | 27% | 1% |
| 1757 | 26% | 1% | 2116 | 28% | 5% | 2441 | 40% | 1% | 2498 | 39% | 1% |
| 1984 | 51% | 1% | 2117 | 31% | 6% | 2442 | 47% | 2% | 2499 | 38% | 2% |
| 1985 | 58% | 1% | 2118 | 30% | 7% | 2443 | 42% | 2% | 2500 | 41% | 1% |
| 1988 | 42% | 1% | 2119 | 27% | 8% | 2444 | 36% | 1% | 2501 | 25% | 1% |
| 1989 | 40% | 1% | 2286 | 15% | 2% | 2445 | 46% | 1% | 2502 | 41% | 1% |
| 1992 | 30% | 1% | 2287 | 7% | 1% | 2446 | 51% | 1% | 2503 | 47% | 1% |
| 1993 | 37% | 1% | 2288 | 8% | 1% | 2447 | 29% | 1% | 2505 | 23% | 1% |
| 1996 | 32% | 1% | 2289 | 5% | 0% | 2448 | 42% | 1% | 2506 | 30% | 1% |
| 1997 | 41% | 1% | 2295 | 9% | 2% | 2449 | 41% | 1% | 2507 | 44% | 2% |
| 2012 | 56% | 1% | 2296 | 4% | 0% | 2450 | 25% | 2% | 2508 | 19% | 1% |
| 2013 | 57% | 2% | 2297 | 4% | 1% | 2451 | 32% | 2% | 2509 | 19% | 1% |
| 2016 | 1% | 0% | 2298 | 3% | 0% | 2452 | 30% | 1% | 2510 | 56% | 1% |
| 2017 | 30% | 2% | 2304 | 0% | 0% | 2453 | 52% | 1% | 2511 | 43% | 2% |
| 2020 | 34% | 1% | 2305 | 4% | 1% | 2454 | 47% | 1% | 2512 | 41% | 2% |
| 2021 | 37% | 3% | 2306 | 3% | 1% | 2455 | 47% | 1% | 2513 | 48% | 1% |
| 2024 | 34% | 2% | 2307 | 3% | 1% | 2456 | 47% | 1% | 2514 | 41% | 1% |
| 2025 | 28% | 2% | 2313 | 10% | 1% | 2457 | 47% | 1% | 2515 | 29% | 1% |
| 2040 | 47% | 1% | 2314 | 6% | 1% | 2458 | 45% | 2% | 2516 | 20% | 1% |
| 2041 | 37% | 2% | 2315 | 4% | 0% | 2459 | 48% | 1% | 2517 | 46% | 1% |
| 2044 | 48% | 2% | 2316 | 4% | 1% | 2460 | 49% | 2% | 2518 | 37% | 1% |
| 2045 | 45% | 1% | 2322 | 9% | 0% | 2461 | 44% | 1% | 2519 | 25% | 1% |
| 2048 | 43% | 2% | 2323 | 7% | 0% | 2462 | 47% | 1% | 2520 | 15% | 1% |
| 2049 | 46% | 1% | 2324 | 4% | 1% | 2463 | 42% | 2% | 2521 | 50% | 1% |
| 2052 | 40% | 2% | 2325 | 5% | 0% | 2465 | 28% | 2% | 2522 | 34% | 1% |
| 2053 | 43% | 2% | 2409 | 18% | 3% | 2466 | 43% | 1% | 2523 | 22% | 1% |
| 2061 | 28% | 2% | 2410 | 25% | 5% | 2467 | 45% | 2% | 2524 | 17% | 1% |
| 2062 | 24% | 2% | 2411 | 35% | 8% | 2468 | 65% | 2% | 2525 | 43% | 1% |
| 2063 | 33% | 3% | 2412 | 27% | 5% | 2469 | 34% | 1% | 2526 | 30% | 2% |
| 2064 | 26% | 2% | 2413 | 25% | 4% | 2470 | 45% | 2% | 2527 | 19% | 2% |
| 2065 | 28% | 2% | 2414 | 6% | 1% | 2471 | 60% | 1% | 2528 | 19% | 1% |
| 2070 | 30% | 2% | 2415 | 8% | 2% | 2472 | 22% | 1% | 2529 | 39% | 2% |
| 2071 | 27% | 2% | 2416 | 3% | 1% | 2473 | 41% | 1% | 2530 | 48% | 2% |
| 2072 | 34% | 3% | 2417 | 4% | 1% | 2474 | 46% | 2% | 2531 | 29% | 2% |
| 2073 | 29% | 2% | 2418 | 4% | 1% | 2475 | 60% | 2% | 2532 | 38% | 1% |
| 2074 | 30% | 2% | 2419 | 4% | 0% | 2476 | 24% | 2% | 2533 | 46% | 2% |
| 2079 | 22% | 2% | 2420 | 4% | 1% | 2477 | 34% | 1% | 2534 | 26% | 2% |
| 2080 | 25% | 2% | 2421 | 3% | 0% | 2478 | 48% | 2% | 2535 | 35% | 1% |
| 2081 | 35% | 3% | 2422 | 6% | 1% | 2479 | 63% | 2% | 2536 | 41% | 2% |
| 2082 | 31% | 3% | 2285 | 8% | 1% | 2480 | 28% | 1% | 2537 | 26% | 2% |
| 2083 | 31% | 3% | 2424 | 8% | 1% | 2481 | 60% | 2% | | | |
| 2088 | 30% | 3% | 2294 | 5% | 1% | 2482 | 46% | 2% | | | |
| 2089 | 30% | 3% | 2303 | 6% | 1% | 2483 | 57% | 2% | | | |
| 2090 | 40% | 4% | 2312 | 8% | 1% | 2484 | 26% | 2% | | | |

TABLE 24f
Correction of L348fs using PE3 systems, experiment 1.

| PEG# | ng # | edit % | indel % | PEG# | ng # | edit % | indel % | PEG# | ng # | edit % | indel % |
|---|---|---|---|---|---|---|---|---|---|---|---|
| 2088 | 543 | 39 | 10 | 2097 | 543 | 52 | 15 | 1729 | none | 33 | 4 |
| 2097 | 543 | 34 | 7 | 2088 | 542 | 46 | 6 | 1989 | none | 45 | 3 |
| 2088 | 537 | 57 | 8 | 2097 | 542 | 45 | 9 | 2045 | none | 50 | 4 |
| 2097 | 537 | 49 | 11 | 2088 | 522 | 50 | 8 | 2021 | none | 52 | 4 |
| 2088 | 531 | 75 | 2 | 2097 | 522 | 42 | 10 | 1984 | 533 | 42 | 2 |
| 2097 | 531 | 51 | 1 | 1727 | 522 | 40 | 4 | 2040 | 533 | 54 | 6 |
| 2088 | 532 | 36 | 2 | 1984 | 522 | 49 | 2 | 2016 | 533 | 38 | 3 |
| 2097 | 532 | 27 | 2 | 2040 | 522 | 34 | 1 | 1729 | 533 | 50 | 13 |
| 2088 | 3211 | 35 | 2 | 2016 | 522 | 39 | 1 | 1989 | 533 | 57 | 4 |
| 2097 | 3211 | 38 | 5 | 1729 | 522 | 37 | 3 | 2045 | 533 | 53 | 3 |
| 1984 | 3209 | 51 | 3 | 1989 | 522 | 57 | 2 | 2021 | 533 | 71 | 5 |
| 2040 | 3209 | 33 | 2 | 2045 | 522 | 53 | 2 | 2088 | 549 | 29 | 5 |
| 2016 | 3209 | 52 | 3 | 2021 | 522 | 42 | 1 | 2097 | 549 | 30 | 5 |
| 1729 | 3209 | 63 | 8 | 2088 | 540 | 49 | 7 | 2088 | 546 | 71 | 4 |
| 1989 | 3209 | 66 | 3 | 2097 | 540 | 46 | 9 | 2097 | 546 | 38 | 2 |
| 2045 | 3209 | 56 | 2 | 2088 | 539 | 45 | 5 | 1727 | 526 | 78 | 1 |
| 2021 | 3209 | 58 | 2 | 2097 | 539 | 37 | 9 | 1984 | 526 | 69 | 1 |
| 1984 | 3210 | 54 | 1 | 2088 | 3215 | 42 | 3 | 2040 | 526 | 43 | 1 |
| 2040 | 3210 | 38 | 1 | 2097 | 3215 | 39 | 4 | 2016 | 526 | 64 | 1 |
| 2016 | 3210 | 44 | 1 | 1727 | 525 | 30 | 3 | 1729 | 526 | 67 | 2 |
| 1729 | 3210 | 56 | 4 | 1984 | 525 | 43 | 2 | 1989 | 526 | 60 | 1 |
| 1989 | 3210 | 57 | 2 | 2040 | 525 | 29 | 1 | 2045 | 526 | 63 | 1 |
| 2045 | 3210 | 67 | 0 | 2016 | 525 | 28 | 1 | 2021 | 526 | 59 | 1 |
| 2021 | 3210 | 53 | 2 | 1729 | 525 | 25 | 2 | 2088 | 548 | 72 | 6 |
| 1984 | 3208 | 55 | 2 | 1989 | 525 | 52 | 2 | 2097 | 548 | 65 | 3 |
| 2040 | 3208 | 60 | 3 | 2045 | 525 | 53 | 2 | 2088 | 550 | 24 | 9 |
| 2016 | 3208 | 43 | 2 | 2021 | 525 | 54 | 3 | 2097 | 550 | 18 | 8 |
| 1729 | 3208 | 67 | 7 | 2088 | 538 | 47 | 5 | 1727 | 527 | 41 | 8 |
| 1989 | 3208 | 57 | 2 | 2097 | 538 | 37 | 6 | 1984 | 527 | 61 | 3 |
| 2045 | 3208 | 58 | 3 | 2088 | 536 | 51 | 7 | 2040 | 527 | 45 | 3 |
| 2021 | 3208 | 67 | 2 | 2097 | 536 | 44 | 5 | 2016 | 527 | 65 | 4 |
| 1984 | 3207 | 61 | 2 | 2088 | 535 | 43 | 5 | 1729 | 527 | 46 | 7 |
| 2040 | 3207 | 59 | 3 | 2097 | 535 | 43 | 6 | 1989 | 527 | 54 | 3 |
| 2016 | 3207 | 51 | 3 | 1727 | 523 | 41 | 12 | 2045 | 527 | 53 | 3 |
| 1729 | 3207 | 65 | 8 | 1984 | 523 | 52 | 4 | 2021 | 527 | 69 | 4 |
| 1989 | 3207 | 71 | 3 | 2040 | 523 | 30 | 2 | 1727 | 3214 | 36 | 1 |
| 2045 | 3207 | 65 | 2 | 2016 | 523 | 45 | 3 | 1984 | 3214 | 51 | 1 |
| 2021 | 3207 | 79 | 3 | 1729 | 523 | 34 | 6 | 2040 | 3214 | 30 | 1 |
| 1984 | 3206 | 62 | 3 | 1989 | 523 | 45 | 3 | 2016 | 3214 | 50 | 1 |
| 2040 | 3206 | 62 | 1 | 2045 | 523 | 48 | 4 | 1729 | 3214 | 35 | 1 |
| 2016 | 3206 | 55 | 2 | 2021 | 523 | 43 | 2 | 1989 | 3214 | 49 | 1 |
| 1729 | 3206 | 64 | 4 | 1984 | 537 | 53 | 2 | 2045 | 3214 | 49 | 1 |
| 1989 | 3206 | 71 | 2 | 2040 | 3216 | 40 | 2 | 2021 | 3214 | 41 | 2 |
| 2045 | 3206 | 64 | 2 | 2016 | 3216 | 63 | 3 | 1727 | 3213 | 35 | 1 |
| 2021 | 3206 | 80 | 2 | 1729 | 3216 | 59 | 8 | 1984 | 3213 | 52 | 1 |
| 1984 | 3205 | 58 | 1 | 1989 | 3216 | 57 | 2 | 2040 | 3213 | 42 | 1 |
| 2040 | 3205 | 54 | 1 | 2045 | 3216 | 55 | 2 | 2016 | 3213 | 48 | 2 |
| 2016 | 3205 | 63 | 2 | 2021 | 3216 | 67 | 2 | 1729 | 3213 | 33 | 1 |
| 1729 | 3205 | 54 | 4 | 1727 | 529 | 40 | 14 | 1989 | 3213 | 52 | 1 |
| 1989 | 3205 | 62 | 1 | 1984 | 529 | 64 | 8 | 2045 | 3213 | 52 | 1 |
| 2045 | 3205 | 63 | 2 | 2040 | 529 | 44 | 8 | 2021 | 3213 | 51 | 1 |
| 2021 | 3205 | 75 | 2 | 2016 | 529 | 61 | 6 | 1727 | 3212 | 36 | 1 |
| 1984 | 3204 | 50 | 2 | 1729 | 529 | 38 | 12 | 1984 | 3212 | 55 | 1 |
| 2040 | 3204 | 50 | 2 | 1989 | 529 | 64 | 8 | 2040 | 3212 | 43 | 1 |
| 2016 | 3204 | 49 | 2 | 2045 | 529 | 62 | 7 | 2016 | 3212 | 61 | 2 |
| 1729 | 3204 | 52 | 4 | 2021 | 529 | 60 | 6 | 1729 | 3212 | 34 | 2 |
| 1989 | 3204 | 70 | 2 | 1727 | 531 | 57 | 14 | 1989 | 3212 | 50 | 1 |
| 2045 | 3204 | 53 | 2 | 1984 | 531 | 58 | 5 | 2045 | 3212 | 49 | 1 |
| 2021 | 3204 | 72 | 2 | 2040 | 531 | 54 | 5 | 2021 | 3212 | 62 | 1 |
| 2088 | 544 | 39 | 6 | 2016 | 531 | 64 | 4 | 2088 | 551 | 38 | 10 |
| 2097 | 544 | 45 | 8 | 1729 | 531 | 50 | 11 | 2097 | 551 | 34 | 8 |
| 1727 | 524 | 30 | 1 | 1989 | 531 | 65 | 3 | 2088 | 552 | 35 | 14 |
| 1984 | 524 | 46 | 1 | 2045 | 531 | 59 | 5 | 2097 | 552 | 31 | 14 |
| 2040 | 524 | 28 | 1 | 2021 | 531 | 69 | 4 | 2088 | 553 | 30 | 9 |
| 2016 | 524 | 40 | 1 | 1984 | 532 | 43 | 3 | 2097 | 553 | 33 | 12 |
| 1729 | 524 | 28 | 1 | 2040 | 532 | 43 | 3 | 2088 | 554 | 49 | 5 |
| 1989 | 524 | 57 | 1 | 2016 | 532 | 40 | 2 | 2097 | 554 | 45 | 5 |
| 2045 | 524 | 51 | 1 | 1729 | 532 | 46 | 7 | 1984 | 530 | 48 | 4 |
| 2021 | 524 | 50 | 1 | 1989 | 532 | 50 | 2 | 2040 | 530 | 44 | 4 |
| 1984 | 523 | 52 | 2 | 2045 | 532 | 53 | 3 | 2016 | 530 | 39 | 3 |
| 2040 | 523 | 40 | 2 | 2021 | 532 | 56 | 2 | 1729 | 530 | 41 | 8 |
| 2016 | 523 | 50 | 2 | 2088 | none | 37 | 2 | 1989 | 530 | 46 | 3 |
| 1729 | 523 | 59 | 8 | 2097 | none | 35 | 3 | 2045 | 530 | 47 | 4 |
| 1989 | 523 | 61 | 2 | 1727 | none | 30 | 4 | 2021 | 530 | 53 | 3 |
| 2045 | 523 | 57 | 2 | 1984 | none | 54 | 4 | | | | |
| 2021 | 523 | 66 | 2 | 2040 | none | 33 | 2 | | | | |

TABLE 24g
Correction of L348fs using PE3 systems, experiment 2.

| PEG# | ng # | edit % | indel % | PEG# | ng # | edit % | indel % | PEG# | ng # | edit % | indel % |
|---|---|---|---|---|---|---|---|---|---|---|---|
| 1984 | 3214 | 49.20% | 1.30% | 2045 | 3204 | 37.90% | 1.60% | 2016 | 531 | 46.50% | 3.90% |
| 1989 | 3214 | 42.40% | 1.50% | 2040 | 3204 | 34.00% | 0.90% | 1729 | 532 | 50.60% | 3.40% |
| 2021 | 3214 | 49.80% | 1.30% | 2021 | 3204 | 47.20% | 1.50% | 1727 | 532 | 49.40% | 4.90% |
| 2016 | 3214 | 42.10% | 1.20% | 2016 | 3204 | 32.70% | 1.10% | 1989 | 532 | 61.50% | 2.50% |
| 1984 | 3213 | 50.60% | 0.90% | 2097 | 544 | 41.50% | 8.00% | 1984 | 532 | 45.90% | 2.00% |
| 1989 | 3213 | 42.10% | 1.00% | 2088 | 544 | 41.20% | 6.70% | 2045 | 532 | 48.40% | 1.50% |
| 2021 | 3213 | 48.10% | 1.00% | 1729 | 524 | 45.30% | 12.80% | 2040 | 532 | 39.70% | 2.80% |
| 2016 | 3213 | 38.30% | 0.90% | 1727 | 524 | 36.40% | 13.20% | 2021 | 532 | 59.60% | 2.90% |
| 1984 | 3212 | 53.50% | 0.90% | 1984 | 524 | 48.20% | 8.80% | 2016 | 532 | 30.50% | 1.30% |
| 1989 | 3212 | 37.80% | 1.20% | 1989 | 524 | 45.00% | 5.10% | 1729 | 523 | 41.90% | 14.50% |
| 2021 | 3212 | 48.20% | 1.40% | 2040 | 524 | 37.70% | 6.80% | 1727 | 523 | 37.70% | 12.70% |
| 2016 | 3212 | 40.70% | 1.30% | 2045 | 524 | 32.90% | 4.10% | 1984 | 523 | 46.50% | 9.70% |
| 1729 | 3214 | 37.60% | 2.30% | 2021 | 524 | 45.10% | 6.10% | 1989 | 523 | 38.10% | 7.40% |
| 1727 | 3214 | 30.60% | 1.10% | 2016 | 524 | 42.60% | 4.80% | 2040 | 523 | 33.60% | 7.00% |
| 2040 | 3214 | 38.50% | 0.50% | 1729 | 523 | 54.70% | 3.70% | 2045 | 523 | 31.70% | 4.50% |
| 2045 | 3214 | 28.10% | 0.70% | 1727 | 523 | 43.80% | 3.30% | 2021 | 523 | 44.50% | 5.80% |
| 1729 | 3213 | 37.10% | 1.30% | 1989 | 523 | 56.40% | 2.00% | 2016 | 523 | 42.10% | 7.30% |
| 1727 | 3213 | 28.00% | 0.80% | 1984 | 523 | 55.70% | 1.00% | 1729 | 533 | 51.10% | 4.50% |
| 2040 | 3213 | 38.10% | 1.10% | 2045 | 523 | 48.20% | 1.40% | 1727 | 533 | 43.40% | 5.20% |
| 2045 | 3213 | 29.20% | 0.70% | 2040 | 523 | 45.10% | 2.40% | 1989 | 533 | 64.00% | 4.40% |
| 1729 | 3212 | 36.40% | 1.20% | 2021 | 523 | 57.00% | 2.40% | 1984 | 533 | 49.60% | 3.00% |
| 1727 | 3212 | 31.30% | 0.60% | 2016 | 523 | 37.60% | 1.90% | 2045 | 533 | 48.60% | 3.50% |
| 2040 | 3212 | 38.80% | 0.40% | 2097 | 543 | 52.20% | 10.90% | 2040 | 533 | 41.80% | 2.70% |
| 2045 | 3212 | 28.90% | 0.60% | 2088 | 543 | 44.70% | 6.80% | 2021 | 533 | 55.40% | 2.70% |
| 2097 | 543 | 41.00% | 6.40% | 2088 | 542 | 40.00% | 3.40% | 2016 | 533 | 35.50% | 1.90% |
| 2088 | 543 | 26.50% | 3.60% | 2097 | 522 | 42.70% | 6.80% | 2097 | 549 | 29.60% | 8.70% |
| 2088 | 537 | 49.40% | 8.30% | 1729 | 522 | 39.90% | 10.10% | 2088 | 549 | 24.70% | 6.40% |
| 2097 | 537 | 48.90% | 6.40% | 2088 | 522 | 39.80% | 5.20% | 2097 | 546 | 59.90% | 3.90% |
| 2097 | 526 | 63.40% | 2.10% | 1727 | 522 | 36.50% | 9.10% | 2088 | 546 | 56.30% | 2.50% |
| 2088 | 526 | 53.00% | 2.10% | 1984 | 522 | 49.30% | 7.30% | 1729 | 526 | 68.50% | 0.90% |
| 2097 | 545 | 34.20% | 2.10% | 1989 | 522 | 43.80% | 5.80% | 1727 | 526 | 64.50% | 0.80% |
| 2088 | 545 | 32.10% | 1.90% | 2040 | 522 | 29.40% | 5.80% | 1984 | 526 | 62.70% | 0.60% |
| 2097 | 3211 | 34.90% | 1.90% | 2045 | 522 | 29.40% | 5.10% | 1989 | 526 | 53.10% | 0.80% |
| 2088 | 3211 | 30.80% | 1.50% | 2021 | 522 | 39.80% | 6.80% | 2040 | 526 | 48.40% | 0.70% |
| 1729 | 3209 | 55.50% | 3.90% | 2016 | 522 | 35.60% | 5.70% | 2045 | 526 | 36.90% | 0.90% |
| 1727 | 3209 | 46.90% | 4.50% | 2097 | 540 | 47.70% | 10.30% | 2021 | 526 | 64.40% | 1.00% |
| 1989 | 3209 | 66.30% | 2.70% | 2088 | 540 | 42.40% | 8.60% | 2016 | 526 | 55.00% | 0.80% |
| 1984 | 3209 | 50.90% | 2.50% | 2097 | 539 | 39.80% | 5.70% | 2097 | 548 | 59.60% | 3.40% |
| 2045 | 3209 | 52.80% | 3.10% | 2088 | 539 | 36.50% | 4.10% | 2088 | 548 | 54.10% | 3.10% |
| 2040 | 3209 | 47.00% | 2.20% | 2097 | 521 | 45.20% | 3.00% | 2097 | 550 | 22.10% | 31.20% |
| 2021 | 3209 | 57.80% | 2.60% | 1729 | 521 | 34.30% | 9.00% | 2088 | 550 | 19.60% | 24.30% |
| 2016 | 3209 | 37.90% | 1.80% | 1727 | 521 | 31.10% | 7.10% | 1729 | 527 | 46.00% | 5.90% |
| 1729 | 3210 | 53.70% | 3.80% | 2088 | 521 | 30.70% | 2.20% | 1727 | 527 | 36.10% | 4.00% |
| 1727 | 3210 | 46.10% | 3.10% | 1984 | 521 | 47.50% | 6.60% | 1984 | 527 | 58.20% | 2.70% |
| 1989 | 3210 | 58.10% | 1.70% | 1989 | 521 | 36.20% | 5.80% | 1989 | 527 | 45.10% | 2.70% |
| 1984 | 3210 | 51.60% | 2.10% | 2040 | 521 | 24.90% | 4.10% | 2040 | 527 | 42.00% | 3.10% |
| 2045 | 3210 | 49.60% | 1.40% | 2045 | 521 | 23.60% | 3.90% | 2045 | 527 | 33.60% | 2.10% |
| 2040 | 3210 | 44.10% | 1.70% | 2016 | 521 | 35.00% | 5.40% | 2021 | 527 | 48.00% | 3.70% |
| 2021 | 3210 | 53.60% | 1.90% | 2021 | 521 | 32.60% | 6.90% | 2016 | 527 | 39.30% | 2.80% |
| 2016 | 3210 | 35.60% | 1.50% | 1729 | 525 | 37.10% | 19.10% | 2097 | 551 | 26.60% | 22.70% |
| 1729 | 3208 | 57.60% | 3.70% | 1727 | 525 | 27.70% | 16.50% | 2088 | 551 | 25.80% | 15.50% |
| 1727 | 3208 | 45.40% | 3.30% | 1984 | 525 | 48.00% | 13.50% | 2097 | 552 | 28.30% | 25.20% |
| 1989 | 3208 | 62.70% | 1.60% | 1989 | 525 | 43.30% | 9.40% | 2088 | 552 | 23.00% | 15.80% |
| 1984 | 3208 | 56.60% | 2.30% | 2040 | 525 | 30.60% | 9.80% | 2097 | 553 | 29.40% | 27.30% |
| 2045 | 3208 | 51.30% | 2.10% | 2045 | 525 | 24.80% | 4.10% | 2088 | 553 | 25.00% | 13.10% |
| 2040 | 3208 | 45.30% | 3.40% | 2016 | 525 | 39.70% | 7.80% | 2097 | 554 | 40.90% | 10.80% |
| 2021 | 3208 | 54.20% | 2.30% | 2021 | 525 | 39.10% | 9.00% | 2088 | 554 | 29.10% | 5.70% |
| 2016 | 3208 | 39.20% | 1.60% | 2097 | 538 | 37.70% | 5.40% | 1729 | 530 | 56.10% | 8.70% |
| 1729 | 3207 | 58.60% | 3.40% | 2088 | 538 | 34.70% | 5.40% | 1727 | 530 | 49.30% | 7.00% |
| 1727 | 3207 | 53.40% | 3.00% | 2088 | 536 | 47.00% | 6.70% | 1989 | 530 | 59.80% | 5.70% |
| 1989 | 3207 | 61.10% | 2.30% | 2097 | 536 | 46.80% | 5.50% | 1984 | 530 | 58.00% | 5.60% |
| 1984 | 3207 | 55.20% | 2.70% | 2097 | 535 | 45.40% | 4.80% | 2040 | 530 | 34.90% | 3.00% |
| 2045 | 3207 | 50.90% | 1.70% | 2088 | 535 | 45.30% | 4.90% | 2021 | 530 | 52.50% | 4.30% |
| 2040 | 3207 | 46.10% | 1.50% | 1729 | 3216 | 52.00% | 3.20% | 2016 | 530 | 34.20% | 2.30% |
| 2021 | 3207 | 57.80% | 2.20% | 1727 | 3216 | 45.00% | 2.70% | 2088 | none | 28.80% | 2.20% |
| 2016 | 3207 | 41.30% | 1.70% | 1989 | 3216 | 56.10% | 1.70% | 2088 | none | 27.10% | 1.50% |
| 1729 | 3206 | 55.90% | 1.70% | 1984 | 3216 | 52.80% | 2.10% | 2097 | none | 28.50% | 2.20% |
| 1727 | 3206 | 44.90% | 2.30% | 2040 | 3216 | 46.40% | 1.70% | 2097 | none | 27.50% | 2.30% |
| 1989 | 3206 | 59.70% | 1.50% | 2045 | 3216 | 43.80% | 1.00% | 1727 | none | 31.30% | 0.80% |
| 1984 | 3206 | 53.40% | 1.30% | 2021 | 3216 | 53.20% | 1.60% | 1727 | none | 29.10% | 0.80% |
| 2045 | 3206 | 52.20% | 1.30% | 2016 | 3216 | 31.30% | 1.50% | 1729 | none | 36.40% | 1.10% |
| 2040 | 3206 | 44.10% | 0.60% | 1729 | 529 | 45.00% | 8.00% | 1729 | none | 35.80% | 1.20% |
| 2021 | 3206 | 51.90% | 1.50% | 1727 | 529 | 40.80% | 7.70% | 2097 | none | 34.80% | 3.20% |
| 2016 | 3206 | 35.40% | 0.80% | 1984 | 529 | 52.00% | 5.60% | 2088 | none | 29.40% | 1.70% |
| 1729 | 3205 | 50.70% | 2.00% | 1989 | 529 | 48.20% | 3.90% | 1984 | none | 44.70% | 0.60% |
| 1727 | 3205 | 37.50% | 1.30% | 2045 | 529 | 36.40% | 2.60% | 1984 | none | 41.30% | 1.00% |
| 1989 | 3205 | 50.70% | 0.90% | 2040 | 529 | 33.90% | 4.40% | 1989 | none | 43.90% | 0.90% |
| 1984 | 3205 | 45.00% | 1.00% | 2016 | 529 | 43.20% | 4.10% | 1989 | none | 40.10% | 0.80% |
| 2045 | 3205 | 41.40% | 1.20% | 2021 | 529 | 37.50% | 2.30% | 2040 | none | 41.80% | 0.60% |
| 2040 | 3205 | 35.50% | 0.80% | 1729 | 531 | 54.20% | 5.40% | 2040 | none | 39.30% | 0.70% |
| 2021 | 3205 | 49.10% | 1.10% | 1727 | 531 | 46.70% | 5.70% | 2045 | none | 43.50% | 1.30% |
| 2016 | 3205 | 32.50% | 1.20% | 1984 | 531 | 62.30% | 5.10% | 2045 | none | 36.00% | 0.80% |
| 1729 | 3204 | 49.70% | 2.00% | 1989 | 531 | 49.10% | 2.70% | 2016 | none | 46.80% | 1.40% |
| 1727 | 3204 | 44.90% | 2.40% | 2040 | 531 | 44.10% | 3.80% | 2016 | none | 38.60% | 1.00% |
| 1984 | 3204 | 47.30% | 1.40% | 2045 | 531 | 38.20% | 2.40% | 2021 | none | 49.80% | 1.10% |
| 1989 | 3204 | 45.40% | 1.20% | 2021 | 531 | 52.30% | 2.80% | 2021 | none | 48.50% | 1.10% |

TABLE 24h
Correction of L348fs using PE3 systems, experiment 3.

| | | First trial | | | | | | Second trial | | | | | |
|---|---|---|---|---|---|---|---|---|---|---|---|---|---|
| | | Replicate A | | Replicate B | | Replicate C | | Replicate A | | Replicate B | | Replicate C | |
| PEG# | ng# | edit % | indel % | edit % | indel % | edit % | indel % | edit % | indel % | edit % | indel % | edit % | indel % |
| 1727 | 3206 | 53.4 | 2.7 | 54.0 | 2.6 | 55.9 | 3.1 | 54.2 | 1.3 | 53.9 | 1.7 | 52.5 | 2.4 |
| 1984 | 3206 | 74.3 | 1.8 | 74.8 | 2.0 | 79.4 | 1.9 | 71.1 | 1.9 | 76.0 | 1.8 | 77.7 | 2.0 |
| 2538 | 3206 | 0.1 | 0.0 | 0.1 | 0.0 | 0.1 | 0.0 | 0.0 | 0.0 | 0.2 | 0.0 | 1.4 | 0.1 |
| 2453 | 3206 | 60.6 | 1.2 | 67.1 | 1.7 | 71.4 | 1.7 | 60.9 | 1.6 | 55.3 | 0.9 | 60.9 | 1.2 |
| 2016 | 3206 | 66.1 | 2.1 | 74.9 | 3.0 | 77.4 | 2.5 | 71.8 | 2.5 | 77.3 | 2.8 | 72.9 | 2.2 |
| 2044 | 3206 | 63.7 | 2.6 | 66.7 | 3.3 | 68.7 | 3.3 | 62.5 | 2.7 | 56.7 | 2.5 | 66.2 | 3.0 |
| 1728 | 3206 | 56.4 | 3.5 | 63.6 | 4.2 | 67.5 | 5.1 | 59.6 | 3.1 | 62.8 | 3.1 | 61.9 | 3.0 |
| 2468 | 3206 | 62.4 | 2.2 | 72.3 | 3.1 | 69.4 | 2.4 | 69.6 | 2.4 | 75.0 | 2.1 | 76.5 | 2.5 |
| 2480 | 3206 | 58.7 | 2.5 | 55.9 | 2.4 | 49.7 | 2.2 | 52.3 | 2.1 | 58.5 | 2.3 | 64.7 | 2.3 |
| 2479 | 3206 | 48.9 | 1.6 | 66.9 | 2.0 | 80.6 | 2.6 | 66.6 | 2.0 | 70.8 | 2.1 | 76.2 | 2.0 |
| 2484 | 3206 | 41.5 | 2.2 | 49.5 | 2.7 | 58.1 | 3.2 | 52.6 | 2.5 | 54.9 | 3.3 | 53.7 | 3.4 |
| 2481 | 3206 | 66.9 | 2.4 | 68.9 | 2.2 | 72.9 | 2.6 | 68.6 | 2.3 | 74.3 | 2.3 | 73.2 | 2.4 |
| 1729 | 3206 | 64.4 | 4.2 | 64.6 | 4.2 | 68.1 | 4.0 | 57.0 | 2.5 | 65.9 | 3.0 | 68.2 | 3.0 |
| 2045 | 3206 | 59.6 | 2.2 | 64.2 | 2.4 | 72.3 | 3.2 | 69.5 | 2.6 | 66.3 | 2.5 | 75.4 | 2.4 |
| 1989 | 3206 | 58.3 | 1.3 | 63.7 | 1.7 | 77.1 | 2.6 | 62.2 | 1.3 | 57.0 | 1.7 | 69.4 | 1.7 |
| 2021 | 3206 | 61.3 | 5.2 | 61.5 | 4.7 | 65.3 | 4.8 | 60.1 | 4.6 | 63.7 | 5.7 | 65.3 | 4.5 |
| 1727 | 526 | 61.1 | 0.7 | 76.4 | 0.9 | 81.5 | 0.9 | 70.8 | 0.5 | 72.2 | 0.7 | 68.5 | 0.8 |
| 1984 | 526 | 77.0 | 1.4 | 80.9 | 1.3 | 83.4 | 1.0 | 79.3 | 1.1 | 79.4 | 0.8 | 82.3 | 1.5 |
| 2538 | 526 | 0.1 | 0.0 | 0.1 | 0.0 | 0.1 | 0.0 | 0.3 | 0.0 | 0.7 | 0.1 | 1.3 | 0.0 |
| 2453 | 526 | 71.3 | 1.0 | 70.6 | 1.1 | 72.3 | 1.0 | 63.1 | 0.7 | 55.7 | 0.6 | 67.0 | 0.8 |
| 2016 | 526 | 75.2 | 1.6 | 82.7 | 1.7 | 81.6 | 1.8 | 76.3 | 1.7 | 82.6 | 1.5 | 77.2 | 1.3 |
| 2044 | 526 | 72.8 | 2.1 | 73.7 | 2.5 | 73.8 | 2.3 | 67.6 | 2.7 | 59.8 | 1.7 | 69.8 | 1.6 |
| 1728 | 526 | 74.6 | 0.9 | 83.1 | 1.1 | 86.0 | 1.3 | 79.3 | 0.8 | 78.4 | 1.1 | 73.3 | 1.3 |
| 2468 | 526 | 73.8 | 1.5 | 76.9 | 1.5 | 79.3 | 1.9 | 80.3 | 1.8 | 78.0 | 1.7 | 80.8 | 1.3 |
| 2480 | 526 | 72.9 | 1.4 | 72.7 | 1.6 | 77.1 | 1.4 | 66.3 | 1.6 | 78.3 | 1.3 | 76.1 | 1.6 |
| 2479 | 526 | 64.8 | 1.4 | 71.7 | 1.4 | 81.2 | 1.9 | 67.4 | 1.7 | 65.7 | 1.6 | 78.5 | 1.7 |
| 2484 | 526 | 65.8 | 1.8 | 71.2 | 1.7 | 76.9 | 1.8 | 74.1 | 1.9 | 70.5 | 1.8 | 68.9 | 2.0 |
| 2481 | 526 | 68.0 | 1.3 | 75.1 | 1.6 | 82.4 | 1.7 | 74.4 | 1.5 | 71.2 | 1.5 | 72.7 | 1.8 |
| 1729 | 526 | 82.1 | 1.3 | 80.5 | 1.3 | 84.3 | 1.3 | 80.5 | 1.3 | 82.3 | 1.2 | 81.9 | 1.1 |
| 2045 | 526 | 68.5 | 1.5 | 76.5 | 1.8 | 83.0 | 2.2 | 75.2 | 2.2 | 76.4 | 1.9 | 78.7 | 2.1 |
| 1989 | 526 | 69.0 | 1.4 | 73.5 | 1.3 | 83.7 | 1.7 | 70.6 | 1.7 | 69.3 | 1.0 | 77.2 | 1.6 |
| 2021 | 526 | 67.8 | 3.7 | 71.3 | 3.6 | 74.8 | 3.8 | 69.9 | 4.0 | 66.2 | 3.3 | 69.0 | 3.6 |
| 2286 | 548 | 0.1 | 0.0 | 0.1 | 0.0 | 0.1 | 0.0 | 0.1 | 0.0 | 0.1 | 0.0 | 0.9 | 0.0 |
| 2295 | 548 | 13.3 | 1.5 | 19.2 | 1.6 | 29.3 | 3.1 | 16.9 | 1.4 | 17.2 | 1.9 | 21.0 | 2.1 |
| 2313 | 548 | 15.7 | 1.2 | 25.9 | 1.8 | 33.9 | 2.7 | 32.4 | 3.4 | 35.0 | 2.6 | 32.9 | 3.1 |
| 2322 | 548 | 22.0 | 1.6 | 25.4 | 1.8 | 28.1 | 2.1 | 25.1 | 2.1 | 22.9 | 2.2 | 26.0 | 1.9 |
| 2288 | 548 | 13.2 | 1.3 | 20.2 | 2.3 | 22.3 | 2.5 | 15.9 | 2.0 | 17.8 | 1.9 | 21.0 | 2.2 |
| 2289 | 548 | 14.9 | 1.3 | 15.9 | 1.3 | 15.6 | 1.0 | 13.4 | 1.0 | 13.1 | 1.2 | 15.6 | 1.4 |
| 2285 | 548 | 19.8 | 1.0 | 20.5 | 1.3 | 24.3 | 1.6 | 18.2 | 1.0 | 20.3 | 1.6 | 23.4 | 1.3 |
| 2312 | 548 | 15.1 | 1.0 | 25.3 | 2.0 | 19.5 | 1.2 | 17.9 | 0.9 | 20.3 | 1.8 | 22.5 | 1.1 |
| 2088 | 548 | 69.9 | 6.3 | 68.9 | 7.4 | 67.3 | 6.1 | 63.4 | 6.5 | 64.6 | 5.7 | 63.7 | 6.7 |
| 2097 | 548 | 71.6 | 9.3 | 66.7 | 7.6 | 63.1 | 6.5 | 59.9 | 6.6 | 63.5 | 6.3 | 61.4 | 7.0 |
| 2063 | 548 | 77.7 | 3.1 | 76.1 | 2.3 | 66.4 | 2.0 | 64.2 | 1.8 | 70.0 | 1.8 | 68.9 | 2.5 |
| 2072 | 548 | 77.5 | 4.2 | 74.2 | 3.1 | 69.3 | 3.0 | 60.6 | 2.3 | 63.1 | 2.7 | 64.6 | 2.6 |
| 2081 | 548 | 69.3 | 7.4 | 69.5 | 6.6 | 68.0 | 6.0 | 57.6 | 4.7 | 60.6 | 5.2 | 62.0 | 5.6 |
| 2090 | 548 | 72.3 | 10.4 | 70.8 | 10.6 | 65.7 | 9.1 | 57.8 | 6.2 | 59.1 | 7.3 | 67.3 | 8.4 |
| 2099 | 548 | 67.6 | 10.8 | 69.9 | 11.7 | 63.0 | 10.3 | 59.2 | 8.2 | 60.0 | 8.4 | 62.6 | 8.8 |
| 2411 | 548 | 73.0 | 5.9 | 86.7 | 3.6 | 63.4 | 5.2 | 64.3 | 5.5 | 62.4 | 5.9 | 60.7 | 5.7 |
| 2108 | 548 | 66.3 | 7.5 | 68.6 | 8.3 | 69.1 | 8.4 | 59.0 | 7.4 | 66.2 | 7.5 | 63.9 | 9.7 |
| 2073 | 548 | 73.6 | 2.9 | 73.1 | 2.6 | 68.7 | 2.2 | 66.4 | 2.2 | 69.5 | 1.8 | 70.3 | 3.8 |
| 2082 | 548 | 73.5 | 4.8 | 70.5 | 5.0 | 69.6 | 5.1 | 72.4 | 5.4 | 76.6 | 4.7 | 70.9 | 6.5 |
| 2091 | 548 | 61.8 | 6.8 | 71.2 | 9.4 | 78.2 | 10.0 | 70.2 | 7.7 | 69.0 | 8.5 | 68.9 | 9.0 |
| 2100 | 548 | 62.3 | 6.7 | 69.6 | 8.5 | 73.6 | 9.1 | 67.0 | 7.8 | 66.5 | 7.9 | 69.8 | 8.3 |
| 2412 | 548 | 76.6 | 6.4 | 77.9 | 6.1 | 69.7 | 5.8 | 70.8 | 4.7 | 68.0 | 6.1 | 67.9 | 6.2 |
| 2412 | 548 | 70.6 | 5.6 | 71.2 | 5.5 | 69.1 | 5.1 | 61.5 | 3.8 | 63.4 | 4.5 | 63.1 | 4.2 |
| 2092 | 548 | 75.7 | 6.6 | 71.7 | 6.1 | 71.9 | 5.7 | 69.9 | 6.8 | 66.5 | 6.5 | 61.6 | 6.6 |
| 2286 | 547 | 0.2 | 0.1 | 0.3 | 0.0 | 0.2 | 0.0 | 0.1 | 0.0 | 0.1 | 0.0 | 0.9 | 0.0 |
| 2295 | 547 | 14.8 | 1.2 | 19.1 | 1.5 | 29.5 | 2.7 | 23.2 | 1.7 | 20.7 | 1.7 | 22.2 | 1.8 |
| 2313 | 547 | 20.0 | 1.2 | 26.5 | 1.5 | 28.3 | 1.5 | 35.9 | 2.0 | 34.3 | 2.2 | 38.4 | 2.2 |
| 2322 | 547 | 18.0 | 1.0 | 29.0 | 1.4 | 28.0 | 1.6 | 27.0 | 1.3 | 23.5 | 0.9 | 29.2 | 1.2 |
| 2288 | 547 | 12.5 | 1.2 | 21.7 | 2.2 | 21.9 | 2.5 | 17.9 | 1.8 | 19.5 | 2.2 | 21.5 | 2.0 |
| 2289 | 547 | 15.2 | 1.0 | 14.9 | 1.0 | 15.0 | 0.9 | 15.7 | 1.4 | 17.7 | 1.3 | 17.5 | 1.2 |
| 2285 | 547 | 14.0 | 0.8 | 23.5 | 1.6 | 24.1 | 1.7 | 24.2 | 1.6 | 20.7 | 1.5 | 21.7 | 1.3 |
| 2312 | 547 | 15.3 | 0.7 | 25.0 | 1.1 | 23.3 | 1.3 | 20.2 | 1.0 | 22.8 | 1.0 | 25.0 | 1.3 |
| 2088 | 547 | 65.0 | 2.7 | 71.9 | 3.9 | 78.2 | 4.0 | 64.7 | 2.2 | 69.8 | 3.4 | 67.8 | 3.3 |
| 2097 | 547 | 68.2 | 3.8 | 74.3 | 3.8 | 77.0 | 4.0 | 70.6 | 3.1 | 75.7 | 3.3 | 74.7 | 4.7 |
| 2063 | 547 | 77.4 | 1.7 | 76.0 | 1.6 | 74.9 | 1.4 | 76.6 | 1.3 | 79.4 | 1.3 | 77.7 | 2.2 |
| 2072 | 547 | 67.5 | 1.3 | 73.5 | 1.7 | 85.1 | 1.7 | 76.6 | 1.5 | 79.4 | 1.7 | 74.1 | 2.1 |
| 2081 | 547 | 76.3 | 1.8 | 79.2 | 1.8 | 82.8 | 2.2 | 79.2 | 2.4 | 74.8 | 2.0 | 78.0 | 2.1 |
| 2090 | 547 | 75.6 | 5.6 | 78.9 | 5.7 | 81.9 | 6.4 | 75.4 | 5.9 | 76.8 | 5.7 | 72.6 | 5.2 |
| 2099 | 547 | 74.5 | 7.1 | 76.1 | 7.3 | 75.7 | 7.1 | 76.4 | 6.4 | 79.1 | 8.5 | 66.1 | 9.5 |
| 2411 | 547 | 71.9 | 4.0 | 70.8 | 4.0 | 72.6 | 3.7 | 64.8 | 3.0 | 59.8 | 3.4 | 57.2 | 4.0 |
| 2108 | 547 | 62.6 | 6.2 | 71.5 | 7.1 | 75.9 | 7.2 | 67.9 | 6.4 | 67.3 | 7.2 | 65.7 | 8.9 |
| 2073 | 547 | 71.2 | 1.4 | 73.6 | 1.6 | 74.6 | 1.2 | 74.9 | 1.0 | 74.7 | 1.2 | 73.7 | 1.8 |
| 2082 | 547 | 71.9 | 3.4 | 70.5 | 3.5 | 75.2 | 3.3 | 71.6 | 3.6 | 72.8 | 3.7 | 76.9 | 4.4 |
| 2091 | 547 | 73.3 | 4.4 | 74.2 | 4.8 | 79.9 | 6.3 | 74.8 | 3.8 | 77.6 | 4.9 | 73.2 | 5.0 |
| 2100 | 547 | 67.6 | 3.6 | 76.6 | 4.2 | 80.8 | 4.4 | 77.1 | 4.3 | 73.8 | 3.8 | 72.6 | 5.3 |
| 2412 | 547 | 74.2 | 4.4 | 77.0 | 4.6 | 77.7 | 4.5 | 74.4 | 4.0 | 82.1 | 4.7 | 73.8 | 5.8 |
| 2412 | 547 | 68.8 | 3.0 | 73.4 | 3.4 | 77.4 | 3.2 | 69.4 | 2.5 | 70.9 | 3.0 | 61.4 | 3.8 |
| 2092 | 547 | 71.5 | 4.1 | 77.0 | 4.5 | 76.7 | 4.5 | 67.0 | 4.3 | 60.1 | 3.8 | 65.1 | 4.8 |

TABLE 24i
Correction of L348fs using PE3 systems, experiment 4.

| PEG# | ng # | edit % | indel % |
|---|---|---|---|
| 1727 | 526 | 23.73 | 0.91 |
| 1984 | 526 | 55.18 | 1.11 |
| 1729 | 526 | 19.40 | 0.64 |
| 1989 | 526 | 10.73 | 0.85 |
| 2045 | 526 | 11.53 | 0.69 |
| 2021 | 526 | 9.73 | 0.77 |
| 2016 | 526 | 16.70 | 0.71 |
| 2044 | 526 | 21.74 | 1.01 |
| 1728 | 526 | 21.21 | 0.65 |
| 2468 | 526 | 42.29 | 1.26 |
| 2480 | 526 | 10.96 | 0.56 |
| 2479 | 526 | 6.08 | 0.35 |
| 2484 | 526 | 7.69 | 0.55 |
| 2481 | 526 | 7.51 | 0.71 |
| 2538 | 526 | 2.20 | 0.36 |
| 2453 | 526 | 19.93 | 0.59 |
| 1727 | 3201 | 4.65 | 0.78 |
| 1984 | 3201 | 8.70 | 0.53 |
| 1729 | 3201 | 4.49 | 0.62 |
| 1989 | 3201 | 3.79 | 0.54 |
| 2045 | 3201 | 5.06 | 0.82 |
| 2021 | 3201 | 4.07 | 0.64 |
| 2016 | 3201 | 4.96 | 0.81 |
| 2044 | 3201 | 4.95 | 0.67 |
| 1728 | 3201 | 3.40 | 0.41 |
| 2468 | 3201 | 9.48 | 0.68 |
| 2480 | 3201 | 35.93 | 6.01 |
| 2479 | 3201 | 3.74 | 0.65 |
| 2484 | 3201 | 4.63 | 0.63 |
| 2481 | 3201 | 3.85 | 0.61 |
| 2538 | 3201 | 3.39 | 0.57 |
| 2453 | 3201 | 3.62 | 0.72 |
| 1727 | 3202 | 12.02 | 0.52 |
| 1984 | 3202 | 35.96 | 0.86 |
| 1729 | 3202 | 12.66 | 0.52 |
| 1989 | 3202 | 3.61 | 0.43 |
| 2045 | 3202 | 5.09 | 0.70 |
| 2021 | 3202 | 5.09 | 0.50 |
| 2016 | 3202 | 7.23 | 0.45 |
| 2044 | 3202 | 7.23 | 0.64 |
| 1728 | 3202 | 10.58 | 0.39 |
| 2468 | 3202 | 32.88 | 1.22 |
| 2480 | 3202 | 6.50 | 0.47 |
| 2479 | 3202 | 4.14 | 0.43 |
| 2484 | 3202 | 3.91 | 0.50 |
| 2481 | 3202 | 5.79 | 0.47 |
| 2538 | 3202 | 2.05 | 0.27 |
| 2453 | 3202 | 6.91 | 0.47 |
| 1727 | 3203 | 12.76 | 0.50 |
| 1984 | 3203 | 41.90 | 0.98 |
| 1729 | 3203 | 10.89 | 0.54 |
| 1989 | 3203 | 8.17 | 0.55 |
| 2045 | 3203 | 4.83 | 0.58 |
| 2021 | 3203 | 6.67 | 0.67 |
| 2016 | 3203 | 6.07 | 0.44 |
| 2044 | 3203 | 10.28 | 0.46 |
| 1728 | 3203 | 32.98 | 0.83 |
| 2468 | 3203 | 33.78 | 1.17 |
| 2480 | 3203 | 9.65 | 0.51 |
| 2479 | 3203 | 9.31 | 0.66 |
| 2484 | 3203 | 6.61 | 0.51 |
| 2481 | 3203 | 8.29 | 0.47 |
| 2538 | 3203 | 2.14 | 0.30 |
| 2453 | 3203 | 10.32 | 0.51 |
| 1727 | none | 22.55 | 0.79 |
| 1984 | none | 44.21 | 1.14 |
| 1729 | none | 16.90 | 0.71 |
| 1989 | none | 8.92 | 0.49 |
| 2045 | none | 9.82 | 0.66 |
| 2021 | none | 6.54 | 0.87 |
| 2016 | none | 5.99 | 0.41 |
| 2044 | none | 10.87 | 0.88 |
| 1728 | none | 24.74 | 0.97 |
| 2468 | none | 43.72 | 1.58 |
| 2480 | none | 10.84 | 0.74 |
| 2479 | none | 10.43 | 0.63 |
| 2484 | none | 7.12 | 0.64 |
| 2481 | none | 11.19 | 0.78 |
| 2538 | none | 2.36 | 0.42 |
| 2453 | none | 16.81 | 0.70 |

TABLE 24j
Correction of G339C using PE3 systems in iPSC.

| | | | | Trial 1 | | | | Trial 2 | | | |
|---|---|---|---|---|---|---|---|---|---|---|---|
| | | | | Replcate A | | Replicate B | | Replcate A | | Replicate B | |
| PEG # | ng# | Dose | | Edit % | Indel % | Edit % | Indel % | Edit % | Indel % | Edit % | Indel % |
| 2021 | 527 | 486.7 | ng | 8.7 | 3.9 | | | | | | |
| 2021 | 527 | 324.5 | ng | 7.6 | 3.3 | 4.2 | 0.9 | 5.2 | 3.3 | 7.9 | 2 |
| 2021 | 527 | 216.4 | ng | 4.7 | 1.5 | 2.7 | 0.4 | 4 | 1.7 | 4.8 | 1 |
| 2021 | 527 | 144.3 | ng | 2.1 | 0.3 | 1.8 | 0.1 | 3.9 | 1 | | |
| 2021 | 527 | 96.1 | ng | 0.9 | 0.1 | 0.9 | 0.1 | 1.9 | 0.3 | 1.9 | 0.1 |
| 2021 | 527 | 64 | ng | 0.6 | 0. | 0.5 | 0.1 | 1 | 0.1 | 0.6 | 0.1 |
| 2021 | 527 | 42.7 | ng | 0.4 | 0 | 0.2 | 0 | 0.4 | 0 | 0.3 | 0 |
| 2021 | 527 | 28.5 | ng | 0.2 | 0 | 0.2 | 0 | 0.2 | 0.1 | 0.5 | 0 |
| 2021 | 527 | 19 | ng | 0.3 | 0 | 0.1 | 0 | 0.1 | 0 | 0.3 | 0 |
| 2021 | 527 | 12.7 | ng | 0.1 | 0.1 | 0.1 | 0 | 0.3 | 0 | 0.2 | 0 |
| 2021 | 527 | 8.5 | ng | 0.3 | 0 | 0.1 | 0 | 0.2 | 0 | 0.3 | 0 |
| 2021 | 527 | 5.6 | ng | 0.2 | 0 | 0.1 | 0 | 0.4 | 0 | 0.2 | 0 |
| 1727 | 526 | 486.7 | ng | 33.2 | 0.7 | | | | | 35.3 | 0.8 |
| 1727 | 526 | 324.5 | ng | 41.3 | 0.9 | 23.3 | 0.5 | 41.1 | 1.1 | 33.3 | 0.8 |
| 1727 | 526 | 216.4 | ng | 31.2 | 0.8 | 15 | 0.2 | 40.4 | 1 | 23.1 | 0.5 |
| 1727 | 526 | 144.3 | ng | 18 | 0.5 | 8.6 | 0.3 | 15.6 | 0.3 | 17.2 | 0.4 |
| 1727 | 526 | 96.1 | ng | 11.1 | 0.3 | 3.8 | 0 | 10.4 | 0.3 | 9.1 | 0.1 |
| 1727 | 526 | 64 | ng | 4.9 | 0.1 | 2.7 | 0.1 | 3.7 | 0.1 | 4.8 | 0.1 |
| 1727 | 526 | 42.7 | ng | 2.5 | 0.1 | 1.4 | 0.1 | 3.4 | 0 | 1.7 | 0 |
| 1727 | 526 | 28.5 | ng | 0.8 | 0 | 0.7 | 0 | 1.2 | 0 | 0.6 | 0 |
| 1727 | 526 | 19 | ng | 0.5 | 0 | 0.4 | 0 | 0.5 | 0 | 0.4 | 0 |
| 1727 | 526 | 12.7 | ng | 0.4 | 0 | 0.3 | 0 | 0.3 | 0 | 0.3 | 0 |
| 1727 | 526 | 8.5 | ng | 0.1 | 0 | 0.1 | 0 | 0.3 | 0 | 0.2 | 0 |
| 1727 | 526 | 5.6 | ng | 0.2 | 0 | 0.2 | 0 | 0.2 | 0 | 0.3 | 0 |
| 2088 | 547 | 486.7 | ng | 41.8 | 2.8 | 44.5 | | 47.8 | | 61 | 3.2 |
| 2088 | 547 | 324.5 | ng | 55.1 | 3.6 | 34.5 | 1.5 | 48.8 | 4.8 | 63.8 | 2.7 |
| 2088 | 547 | 216.4 | ng | 50.8 | 2.1 | 22.2 | 1.3 | 48.4 | 2.6 | 53.4 | 2 |
| 2088 | 547 | 144.3 | ng | 44 | 1.4 | 14.4 | 0.8 | 42.1 | 2 | 39.1 | 1.2 |
| 2088 | 547 | 96.1 | ng | 28.9 | 0.8 | 7.8 | 0.4 | 22 | 2 | 29.6 | 1 |
| 2088 | 547 | 64 | ng | 13.7 | 0.4 | 5.3 | 0.2 | 15.3 | 0.6 | 18.3 | 0.4 |
| 2088 | 547 | 42.7 | ng | 6.9 | 0.1 | 3.3 | 0.1 | 5.4 | 0.4 | 11.4 | 0.3 |
| 2088 | 547 | 28.5 | ng | 5.5 | 0.2 | 1.9 | 0.1 | 3.4 | 0.2 | 4.7 | 0.1 |
| 2088 | 547 | 19 | ng | 2.7 | 0.1 | 1.4 | 0 | 1.7 | 0.1 | 3.5 | 0.1 |
| 2088 | 547 | 12.7 | ng | 2 | 0 | 0.9 | 0 | 1 | 0.1 | 1.6 | 0.1 |
| 2088 | 547 | 8.5 | ng | 1.3 | 0.1 | 0.5 | 0 | 0.4 | 0 | 1.1 | 0 |
| 2088 | 547 | 5.6 | ng | 1.1 | 0 | | 0 | | 0 | 0.8 | 0 |
| 1989 | 3206 | 486.7 | ng | 12.1 | 1.8 | 6.9 | 0.4 | 4.2 | 0.2 | 10.8 | 1.4 |
| 1989 | 3206 | 324.5 | ng | 11.4 | 1.2 | 5.7 | 0.3 | 6.2 | 0.6 | 7.9 | 1 |
| 1989 | 3206 | 216.4 | ng | 11.2 | 1.2 | 2.4 | 0.1 | 3.8 | 0.3 | 5.6 | 0.7 |
| 1989 | 3206 | 144.3 | ng | 4.5 | 0.3 | 0.9 | 0.1 | 4.3 | 0.4 | 3.2 | 0.2 |
| 1989 | 3206 | 96.1 | ng | 1.6 | 0.1 | 0.5 | 0 | 2.2 | 0.2 | 1.7 | 0.2 |
| 1989 | 3206 | 64 | ng | 0.6 | 0 | 0.5 | 0.1 | 0.4 | 0.1 | 0.7 | 0.1 |
| 1989 | 3206 | 42.7 | ng | 0.3 | 0 | 0.3 | 0 | 0.3 | 0 | 0.3 | 0 |
| 1989 | 3206 | 28.5 | ng | 0.2 | 0 | 0.3 | 0 | 0.2 | 0.1 | 0.3 | 0 |
| 1989 | 3206 | 19 | ng | 0.2 | 0 | 0.3 | 0 | 0.1 | 0 | 0.3 | 0 |
| 1989 | 3206 | 12.7 | ng | 0.1 | 0 | 0.2 | 0 | 0.1 | 0 | 0.1 | 0 |
| 1989 | 3206 | 8.5 | ng | 0.2 | 0 | 0.3 | 0 | 0.2 | 0 | 0.1 | 0 |
| 1989 | 3206 | 5.6 | ng | 0.1 | 0 | 0.2 | 0 | 0.1 | 0 | 0.2 | 0 |
| 2021 | none | 486.7 | ng | 8.7 | 1.6 | | 0.6 | | 0.5 | | 0.8 |
| 2021 | none | 324.5 | ng | 7.6 | 0.7 | 4.2 | 0.3 | 5.2 | 1 | 7.9 | 1 |
| 2021 | none | 216.4 | ng | 4.7 | 0.9 | 2.7 | 0.2 | 4 | 0.5 | 4.8 | 0.5 |
| 2021 | none | 144.3 | ng | 2.1 | 0.1 | 1.8 | 0.1 | 3.9 | 0.8 | | 0.2 |
| 2021 | none | 96.1 | ng | 0.9 | 0.1 | 0.9 | 0 | 1.9 | 0.4 | 1.9 | 0.1 |
| 2021 | none | 64 | ng | 0.6 | 0 | 0.5 | 0 | 1 | 0 | 0.6 | 0 |
| 2021 | none | 42.7 | ng | 0.4 | 0 | 0.2 | 0 | 0.4 | 0.1 | 0.3 | 0.1 |
| 2021 | none | 28.5 | ng | 0.2 | 0 | 0.2 | 0 | 0.2 | 0.1 | 0.5 | 0 |
| 2021 | none | 19 | ng | 0.3 | 0 | 0.1 | 0 | 0.1 | 0 | 0.3 | 0 |
| 2021 | none | 12.7 | ng | 0.1 | 0 | 0.1 | 0 | 0.3 | 0 | 0.2 | 0 |
| 2021 | none | 8.5 | ng | 0.3 | 0 | 0.1 | 0 | 0.2 | 0 | 0.3 | 0 |
| 2021 | none | 5.6 | ng | 0.2 | 0 | 0.1 | 0 | 0.4 | 0 | 0.2 | 0 |
| 1727 | none | 486.7 | ng | 33.2 | 0.9 | | 0.3 | | 0.6 | 35.3 | 0.7 |
| 1727 | none | 324.5 | ng | 41.3 | 1 | 23.3 | 0.4 | 41.1 | 1 | 33.3 | 0.9 |
| 1727 | none | 216.4 | ng | 31.2 | 0.8 | 15 | 0.2 | 40.4 | 0.8 | 23.1 | 0.7 |
| 1727 | none | 144.3 | ng | 18 | 0.6 | 8.6 | 0.1 | 15.6 | 0.5 | 17.2 | 0.3 |
| 1727 | none | 96.1 | ng | 11.1 | 0.2 | 3.8 | 0.1 | 10.4 | 0.3 | 9.1 | 0.3 |
| 1727 | none | 64 | ng | 4.9 | 0.1 | 2.7 | 0.1 | 3.7 | 0.1 | 4.8 | 0.1 |
| 1727 | none | 42.7 | ng | 2.5 | 0 | 1.4 | 0 | 3.4 | 0 | 1.7 | 0.1 |
| 1727 | none | 28.5 | ng | 0.8 | 0 | 0.7 | 0 | 1.2 | 0 | 0.6 | 0 |
| 1727 | none | 19 | ng | 0.5 | 0 | 0.4 | 0 | 0.5 | 0 | 0.4 | 0 |
| 1727 | none | 12.7 | ng | 0.4 | 0 | 0.3 | 0 | 0.3 | 0 | 0.3 | 0 |
| 1727 | none | 8.5 | ng | 0.1 | 0 | 0.1 | 0 | 0.3 | 0 | 0.2 | 0 |
| 1727 | none | 5.6 | ng | 0.2 | 0 | 0.2 | 0 | 0.2 | 0 | 0.3 | 0 |
| 2088 | none | 486.7 | ng | 41.8 | 1.2 | 44.5 | 1.4 | 47.8 | 1.4 | 61 | 2 |
| 2088 | none | 324.5 | ng | 55.1 | 2.4 | 34.5 | 1.2 | 48.8 | 1.5 | 63.8 | 2 |
| 2088 | none | 216.4 | ng | 50.8 | 1.9 | 22.2 | 1.1 | 48.4 | 2.3 | 53.4 | 1.3 |
| 2088 | none | 144.3 | ng | 44 | 1.2 | 14.4 | 0.7 | 42.1 | 1.9 | 39.1 | 1.1 |
| 2088 | none | 96.1 | ng | 28.9 | 0.6 | 7.8 | 0.3 | 22 | 0.8 | 29.6 | 0.8 |
| 2088 | none | 64 | ng | 13.7 | 0.4 | 5.3 | 0.2 | 15.3 | 0.4 | 18.3 | 0.3 |
| 2088 | none | 42.7 | ng | 6.9 | 0.1 | 3.3 | 0.2 | 5.4 | 0.4 | 11.4 | 0.2 |
| 2088 | none | 28.5 | ng | 5.5 | 0.1 | 1.9 | 0.1 | 3.4 | 0.1 | 4.7 | 0.1 |
| 2088 | none | 19 | ng | 2.7 | 0.1 | 1.4 | 0.1 | 1.7 | 0.1 | 3.5 | 0.1 |
| 2088 | none | 12.7 | ng | 2 | 0.1 | 0.9 | 0.1 | 1 | 0.1 | 1.6 | 0.1 |
| 2088 | none | 8.5 | ng | 1.3 | 0 | 0.5 | 0.1 | 0.4 | 0 | 1.1 | 0 |
| 2088 | none | 5.6 | ng | 1.1 | 0 | | 0 | | 0 | 0.8 | 0 |
| 1989 | none | 486.7 | ng | 12.1 | 1.2 | 6.9 | 0.1 | 4.2 | 0.3 | 10.8 | 0.4 |
| 1989 | none | 324.5 | ng | 11.4 | 0.6 | 5.7 | 0.2 | 6.2 | 0.5 | 7.9 | 0.3 |
| 1989 | none | 216.4 | ng | 11.2 | 0.6 | 2.4 | 0.1 | 3.8 | 0.8 | 5.6 | 0.2 |
| 1989 | none | 144.3 | ng | 4.5 | 0.2 | 0.9 | 0.1 | 4.3 | 0.3 | 3.2 | 0 |
| 1989 | none | 96.1 | ng | 1.6 | 0.1 | 0.5 | 0 | 2.2 | 0.2 | 1.7 | 0.1 |
| 1989 | none | 64 | ng | 0.6 | 0 | 0.5 | 0 | 0.4 | 0 | 0.7 | 0 |
| 1989 | none | 42.7 | ng | 0.3 | 0 | 0.3 | 0 | 0.3 | 0 | 0.3 | 0 |
| 1989 | none | 28.5 | ng | 0.2 | 0 | 0.3 | 0 | 0.2 | 0 | 0.3 | 0 |
| 1989 | none | 19 | ng | 0.2 | 0 | 0.3 | 0 | 0.1 | 0 | 0.3 | 0 |
| 1989 | none | 12.7 | ng | 0.1 | 0 | 0.2 | 0 | 0.1 | 0 | 0.1 | 0 |
| 1989 | none | 8.5 | ng | 0.2 | 0.1 | 0.3 | 0 | 0.2 | 0 | 0.1 | 0 |
| 1989 | none | 5.6 | ng | 0.1 | 0 | 0.2 | 0 | 0.1 | 0 | 0.2 | 0 |

TABLE 24k
Partial list of sequences

| SEQ REF | |
|---|---|
| NO. | Sequence |
| 6043 | UCGUUGGCUAUGACUCCAAA |
| 6044 | GUUGGGAGGGGCACUCUCGU |
| 6045 | GGUGCCACACAAGUUGGGAG |
| 6046 | CGUAUGGCCCCAUUGCCGUU |
| 6047 | GUAUUUGGUUUCUCCUCGUA |
| 6048 | CUGGUAUUGGGAGCUGUAUU |
| 6049 | UGCCcuGUUU |
| 6050 | UGCacuGUUU |
| 6051 | UGCgcuGUUU |
| 6052 | UGCucuGUUU |
| 6053 | UUGCCcuGUUU |
| 6054 | UUGCacuGUUU |
| 6055 | UUGCgcuGUUU |
| 6056 | UUGCucuGUUU |
| 6057 | AUUGCCcuGUUU |
| 6058 | AUUGCacuGUUU |
| 6059 | AUUGCgcuGUUU |
| 6060 | AUUGCucuGUUU |
| 6061 | GCCCCAUUGCCcuGUUU |
| 6062 | GCCCCAUUGCacuGUUU |
| 6063 | GCCCCAUUGCgcuGUUU |
| 6064 | GCCCCAUUGCucuGUUU |
| 6065 | GGCCCCAUUGCCcuGUUU |
| 6066 | GGCCCCAUUGCacuGUUU |
| 6067 | GGCCCCAUUGCgcuGUUU |
| 6068 | GGCCCCAUUGCucuGUUU |
| 6069 | UGGCCCCAUUGCCcuGUUU |
| 6070 | UGGCCCCAUUGCacuGUUU |
| 6080 | UGGCCCCAUUGCgcuGUUU |
| 6072 | UGGCCCCAUUGCucuGUUU |
| 6081 | AUGGCCCCAUUGCCcuGUUU |
| 402 | AUGGCCCCAUUGCacuGUUU |
| 6082 | AUGGCCCCAUUGCgcuGUUU |
| 6076 | AUGGCCCCAUUGCucuGUUU |
| 6077 | UAUGGCCCCAUUGCCcuGUUU |
| 6078 | GUAUGGCCCCAUUGCCcuGUUU |
| 407 | UCGUAUGGCCCCAUUGCCcuGUUU |
| 408 | UCCUCGUAUGGCCCCAUUGCCcuGUUU |
| 409 | UCUCCUCGUAUGGCCCCAUUGCCcuGUUU |
| 410 | UUCUCCUCGUAUGGCCCCAUUGCCcuGUUU |
| 411 | UUUCUCCUCGUAUGGCCCCAUUGCCcuGUUU |
| 412 | GUUUCUCCUCGUAUGGCCCCAUUGCCcuGUUU |
| 413 | GGUUUCUCCUCGUAUGGCCCCAUUGCCcuGUUU |
| 414 | UGGUUUCUCCUCGUAUGGCCCCAUUGCCcuGUUU |
| 415 | UUGGUUUCUCCUCGUAUGGCCCCAUUGCCcuGUUU |
| 416 | UUUGGUUUCUCCUCGUAUGGCCCCAUUGCCcuGUUU |
| 417 | AUUUGGUUUCUCCUCGUAUGGCCCCAUUGCCcuGUUU |
| 418 | GCCcuGUUUGGAGUCAUAGCCAACG |
| 419 | UGCCcuGUUUGGAGUCAUAGCCAACG |
| 420 | UUGCCcuGUUUGGAGUCAUAGCCAACG |
| 421 | AUUGCCcuGUUUGGAGUCAUAGCCAACG |
| 422 | GCCCCAUUGCCcuGUUUGGAGUCAUAGCCAACG |
| 423 | GGCCCCAUUGCCcuGUUUGGAGUCAUAGCCAACG |
| 424 | UGGCCCCAUUGCCcuGUUUGGAGUCAUAGCCAACG |
| 425 | AUGGCCCCAUUGCCcuGUUUGGAGUCAUAGCCAACG |
| 426 | UAUGGCCCCAUUGCCcuGUUUGGAGUCAUAGCCAACG |
| 427 | GCCcuGUUUGGAGUCAUAGCCAACGAGAGUGCCCCUC |
| 428 | ACUCCAAACag |
| 429 | GACUCCAAACag |
| 430 | UGACUCCAAACag |
| 431 | AUGACUCCAAACag |
| 432 | UAUGACUCCAAACag |
| 433 | GCUAUGACUCCAAACag |
| 434 | GGCUAUGACUCCAAACag |
| 435 | UGGCUAUGACUCCAAACag |
| 436 | UUGGCUAUGACUCCAAACag |
| 437 | GUUGGCUAUGACUCCAAACag |
| 438 | UCGUUGGCUAUGACUCCAAACag |
| 439 | UCUCGUUGGCUAUGACUCCAAACag |
| 440 | ACUCUCGUUGGCUAUGACUCCAAACag |
| 441 | GCACUCUCGUUGGCUAUGACUCCAAACag |
| 442 | GGCACUCUCGUUGGCUAUGACUCCAAACag |
| 443 | GGGCACUCUCGUUGGCUAUGACUCCAAACag |
| 444 | GGGGCACUCUCGUUGGCUAUGACUCCAAACag |
| 445 | AGGGGCACUCUCGUUGGCUAUGACUCCAAACag |
| 446 | GAGGGGCACUCUCGUUGGCUAUGACUCCAAACag |
| 447 | GGAGGGGCACUCUCGUUGGCUAUGACUCCAAACag |
| 448 | GGGAGGGGCACUCUCGUUGGCUAUGACUCCAAACag |
| 449 | UGGGAGGGGCACUCUCGUUGGCUAUGACUCCAAACag |
| 450 | ACagGGCAAUGGGGCCAUAC |
| 451 | AACagGGCAAUGGGGCCAUAC |
| 452 | AAACagGGCAAUGGGGCCAUAC |
| 453 | UCCAAACagGGCAAUGGGGCCAUAC |
| 454 | ACUCCAAACagGGCAAUGGGGCCAUAC |
| 455 | GACUCCAAACagGGCAAUGGGGCCAUAC |
| 456 | UGACUCCAAACagGGCAAUGGGGCCAUAC |
| 457 | AUGACUCCAAACagGGCAAUGGGGCCAUAC |
| 458 | UAUGACUCCAAACagGGCAAUGGGGCCAUAC |
| 459 | GCUAUGACUCCAAACagGGCAAUGGGGCCAUAC |
| 460 | GGCUAUGACUCCAAACagGGCAAUGGGGCCAUAC |
| 461 | UGGCUAUGACUCCAAACagGGCAAUGGGGCCAUAC |
| 462 | UUGGCUAUGACUCCAAACagGGCAAUGGGGCCAUAC |
| 463 | GUUGGCUAUGACUCCAAACagGGCAAUGGGGCCAUAC |
| 464 | ACagGGCAAUGGGGCCAUACGAGGAGAAACCAAAU |
| 465 | AACagGGCAAUGGGGCCAUACGAGGAGAAACCAAAU |
| 466 | AAACagGGCAAUGGGGCCAUACGAGGAGAAACCAAAU |
| | GGAGUCA (SEQ REF NO: 467) |
| | GGAGUCAU (SEQ REF NO: 468) |
| | GGAGUCAUA (SEQ REF NO: 469) |
| 470 | GGAGUCAUAG |
| 471 | GGAGUCAUAGC |
| 472 | GGAGUCAUAGCC |
| 473 | GGAGUCAUAGCCA |
| 474 | GGAGUCAUAGCCAA |
| 475 | GGAGUCAUAGCCAAC |
| | AGAGUGC (SEQ REF NO: 476) |
| | AGAGUGCC (SEQ REF NO: 477) |
| | AGAGUGCCC (SEQ REF NO: 478) |
| 479 | AGAGUGCCCC |
| 480 | AGAGUGCCCCU |
| 481 | AGAGUGCCCCUC |
| 482 | AGAGUGCCCCUCC |
| 483 | AGAGUGCCCCUCCC |
| 484 | AGAGUGCCCCUCCCA |
| | CCAACUU (SEQ REF NO: 485) |
| | CCAACUUG (SEQ REF NO: 486) |
| | CCAACUUGU (SEQ REF NO: 487) |
| 488 | CCAACUUGUG |
| 489 | CCAACUUGUGU |
| 490 | CCAACUUGUGUG |
| 491 | CCAACUUGUGUGG |
| 492 | CCAACUUGUGUGGC |
| 493 | CCAACUUGUGUGGCA |
| | GGCAAUG (SEQ REF NO: 494) |
| | GGCAAUGG (SEQ REF NO: 495) |
| | GGCAAUGGG (SEQ REF NO: 496) |
| 497 | GGCAAUGGGG |
| 498 | GGCAAUGGGGC |
| 499 | GGCAAUGGGGCC |
| 500 | GGCAAUGGGGCCA |
| 501 | GGCAAUGGGGCCAU |
| 502 | GGCAAUGGGGCCAUA |
| | GAGGAGA (SEQ REF NO: 503) |
| | GAGGAGAA (SEQ REF NO: 504) |
| | GAGGAGAAA (SEQ REF NO: 505) |
| 506 | GAGGAGAAAC |
| 507 | GAGGAGAAACC |
| 508 | GAGGAGAAACCA |
| 509 | GAGGAGAAACCAA |
| 510 | GAGGAGAAACCAAA |
| 511 | GAGGAGAAACCAAAU |
| | ACAGCUC (SEQ REF NO: 512) |
| | ACAGCUCC (SEQ REF NO: 513) |
| | ACAGCUCCC (SEQ REF NO: 514) |
| 515 | ACAGCUCCCA |
| 516 | ACAGCUCCCAA |
| 517 | ACAGCUCCCAAU |
| 518 | ACAGCUCCCAAUA |
| 519 | ACAGCUCCCAAUAC |
| 520 | ACAGCUCCCAAUACC |
| 521 | AUUGUGGGACUCAUGGCCAA |
| 522 | CCACGCCAUUGUGGGACUCA |
| 523 | GGCACCUCCCACGCCAUUGU |
| 524 | UGGCACCUCCCACGCCAUUG |
| 525 | AGUGCCCCUCCCAACUUGUG |
| 526 | UAUGGCCCCAUUGCCcuGUU |
| 527 | GUAUUUGGUUUCUCCUCGUA |
| 528 | CUGGUAUUGGGAGCUGUAUU |
| 529 | CAGCUCUGGAUCCUGGUAUU |
| 530 | GCAGCUCUGGAUCCUGGUAU |
| 531 | CCCUUGGCAGCUCUGGAUCC |
| 532 | CACUCUGCCCUUGGCAGCUC |
| 533 | AUGCCACUCCACUCUGCCCU |
| 534 | UAGAAGUUAACACUUACCAU |
| 535 | AUUGGCCAUGAGUCCCACAA |
| 536 | CCAUGAGUCCCACAAUGGCG |
| 537 | CAUGAGUCCCACAAUGGCGU |
| 538 | GAGUCCCACAAUGGCGUGGG |
| 539 | GUGGGAGGUGCCACACAAGU |
| 540 | UGGGAGGUGCCACACAAGUU |
| 541 | GAGGUGCCACACAAGUUGGG |
| 542 | AGGUGCCACACAAGUUGGGA |
| 543 | GGUGCCACACAAGUUGGGAG |
| 544 | GUUGGGAGGGGCACUCUCGU |
| 545 | GUUGGCUAUGACUCCAAACa |
| 546 | UAUGACUCCAAACagGGCAA |
| 547 | AUGACUCCAAACagGGCAAU |
| 548 | UGACUCCAAACagGGCAAUG |
| 549 | CagGGCAAUGGGGCCAUACG |
| 550 | CAAAUACAGCUCCCAAUACC |
| 551 | ACCAGGAUCCAGAGCUGCCA |
| 552 | CCAGGAUCCAGAGCUGCCAA |
| 553 | CAGAGCUGCCAAGGGCAGAG |
| 554 | CUGCCAAGGGCAGAGUGGAG |
| 555 | AGUGGAGUGGCAUUCAGAGU |
| 3201 | UAUGGCCCCAUUGCUCUGUU |
| 3202 | UAUGGCCCCAUUGCACUGUU |
| 3203 | UAUGGCCCCAUUGCGCUGUU |
| 3204 | ACCAAGCCUUCUUCUUGCUU |
| 3205 | AGCCUUCUUCUUGCUUUGGC |
| 3206 | GCCUUCUUCUUGCUUUGGCA |
| 3207 | CCUUCUUCUUGCUUUGGCAG |
| 3208 | UCUUCUUGCUUUGGCAGGGG |
| 3209 | GCAGGGGUGGGUAGGCAGGU |
| 3210 | UUUGGCAGGGGUGGGUAGGC |
| 3211 | CGUUGGCUAUGACUCCAAAC |
| 3212 | GUAUUUGGUUUCUCAUCGUA |
| 3213 | GUAUUUGGUUUCUCGUCGUA |
| 3214 | GUAUUUGGUUUCUCUUCGUA |
| 3215 | CCCCUGCCAAAGCAAGAAGA |
| 3216 | UUGCUUUGGCAGGGGUGGGU |
| 6001 | CUAUGACUCCAAACag |
| 6003 | CCAAACagGGCAAUGGGGCCAUAC |
| 6004 | CUCCAAACagGGCAAUGGGGCCAUAC |
| 6005 | CAUUGCucuGUUU |
| 6006 | CAUUGCgcuGUUU |
| 6007 | CAUUGCacuGUUU |
| 6008 | CCAUUGCucuGUUU |
| 6009 | CCAUUGCgcuGUUU |
| 6010 | CCAUUGCacuGUUU |
| 6011 | CCCAUUGCucuGUUU |
| 6012 | CCCAUUGCgcuGUUU |
| 6013 | CCCAUUGCacuGUUU |
| 6014 | CCCCAUUGCucuGUUU |
| 6015 | CCCCAUUGCgcuGUUU |
| 6016 | CCCCAUUGCacuGUUU |
| 6017 | CCCCAUUGCCcuGUUU |
| 6018 | CAUUGCCcuGUUU |
| 6019 | CCAUUGCCcuGUUU |
| 6020 | CCCAUUGCCcuGUUU |

1. (canceled)

2. A prime editing guide RNA (PEgRNA) comprising:
a spacer that comprises a region of complementarity to a search target sequence on a target strand of an SLC37A4 gene,
an editing template that comprises an intended nucleotide edit compared to the SLC37A4 gene and a region of complementarity to an editing target sequence on a non-target strand of the SLC37A4 gene, a primer binding site (PBS) that comprises a region of complementarity to a region immediately upstream of a nick site in the non-target strand, and
a gRNA core that associates with a prime editor comprising a DNA binding domain and a DNA polymerase domain,
wherein the target strand and the non-target strand are complementary to each other, and wherein the editing target sequence comprises
i) a codon encoding cysteine corresponding to position 339 of a SLC37A4 wild-type peptide and the intended nucleotide edit comprises a T>G nucleotide substitution at position 1015 in the coding sequence of the SLC37A4 gene, or
ii) a 2-nucleotide deletion corresponding to positions 1042-1043 of a coding sequence of an SLC37A4 wild-type gene, and wherein the intended nucleotide edit comprises a CT insertion at the position corresponding to 1042 of the coding sequence of the SLC37A4 wild-type gene.

3.-11. (canceled)

12. The PEgRNA of claim 112, wherein the editing template is about 10 to 30 nucleotides in length.

13. (canceled)

14. The PEgRNA of claim 2, wherein the gRNA core is between the spacer and the editing template.

15.-16. (canceled)

17. The PEgRNA of claim 2, wherein the PBS and the editing template are directly adjacent to each other.

18.-19. (canceled)

20. The PEgRNA of claim 2, wherein the PBS is about 8 to 16 nucleotides in length.

21.-23. (canceled)

24. The PEgRNA of claim 2, wherein the search target sequence is complementary to a protospacer sequence in the SLC37A4 gene, and wherein the protospacer sequence is adjacent to a search target adjacent motif (PAM) in the SLC37A4 gene and wherein the PEgRNA guides the prime editor to incorporate a further intended nucleotide edit in the PAM when contacted with the SLC37A4 gene.

25.-35. (canceled)

36. The PEgRNA of claim 2, wherein the spacer comprises a sequence selected from the spacer sequences listed in Table 8.

37. The PEgRNA of claim 36, wherein the editing template comprises a sequence selected from the editing template sequences listed in Table 9a, Table 10a, Table 11a, Table 12a, Table 13a, Table 14a, Table 15a, Table 16a, Table 17a, Table 18a, Table 19a, Table 20a, Table 21a, Table 22a, Table 23a, and Table 24a.

38. The PEgRNA of any one of claim 37, wherein the PBS comprises a sequence selected from the PBS sequences listed in Table 9b, Table 10b, Table 11b, Table 12b, Table 13b, Table 14b, Table 15b, Table 16b, Table 17b, Table 18b, Table 19b, Table 20b, Table 21b, Table 22b, Table 23b, and Table 24b.

39. The PEgRNA of claim 38, wherein:
the spacer comprises the sequence of S01, the editing template comprises a sequence selected from the editing template sequences listed in Table 9a, and the PBS comprises a sequence selected from the PBS sequences listed in Table 9b; or
the spacer comprises the sequence of S02, the editing template comprises a sequence selected from the editing template sequences listed in Table 10a, and the PBS comprises a sequence selected from the PBS sequences listed in Table 10b; or
the spacer comprises the sequence of S03, the editing template comprises a sequence selected from the editing template sequences listed in Table 11a, and the PBS comprises a sequence selected from the PBS sequences listed in Table 11b; or
the spacer comprises the sequence of S04, the editing template comprises a sequence selected from the editing template sequences listed in Table 12a, and the PBS comprises a sequence selected from the PBS sequences listed in Table 12b; or
the spacer comprises the sequence of S05, the editing template comprises a sequence selected from the editing template sequences listed in Table 13a, and the PBS comprises a sequence selected from the PBS sequences listed in Table 13b; or
the spacer comprises the sequence of S06, the editing template comprises a sequence selected from the editing template sequences listed in Table 14a, and the PBS comprises a sequence selected from the PBS sequences listed in Table 14b; or
the spacer comprises the sequence of S07, the editing template comprises a sequence selected from the editing template sequences listed in Table 15a, and the PBS comprises a sequence selected from the PBS sequences listed in Table 15b; or
the spacer comprises the sequence of S08, the editing template comprises a sequence selected from the editing template sequences listed in Table 16a, and the PBS comprises a sequence selected from the PBS sequences listed in Table 16b; or
the spacer comprises the sequence of S09, the editing template comprises a sequence selected from the editing template sequences listed in Table 17a, and the PBS comprises a sequence selected from the PBS sequences listed in Table 17b; or
the spacer comprises the sequence of S10, the editing template comprises a sequence selected from the editing template sequences listed in Table 18a, and the PBS comprises a sequence selected from the PBS sequences listed in Table 18b; or
the spacer comprises the sequence of S11, the editing template comprises a sequence selected from the editing template sequences listed in Table 19a, and the PBS comprises a sequence selected from the PBS sequences listed in Table 19b; or
the spacer comprises the sequence of S12, the editing template comprises a sequence selected from the editing template sequences listed in Table 20a, and the PBS comprises a sequence selected from the PBS sequences listed in Table 20b; or
the spacer comprises the sequence of S13, the editing template comprises a sequence selected from the editing template sequences listed in Table 21a, and the PBS comprises a sequence selected from the PBS sequences listed in Table 21b; or
the spacer comprises the sequence of S14, the editing template comprises a sequence selected from the editing template sequences listed in Table 22a, and the PBS comprises a sequence selected from the PBS sequences listed in Table 22b; or
the spacer comprises the sequence of S15, the editing template comprises a sequence selected from the editing template sequences listed in Table 23a, and the PBS comprises a sequence selected from the PBS sequences listed in Table 23b; or
the spacer comprises the sequence of S16, the editing template comprises a sequence selected from the editing template sequences listed in Table 24a, and the PBS comprises a sequence selected from the PBS sequences listed in Table 24b.

40.-42. (canceled)

43. A PEgRNA system comprising the PEgRNA according to claim 2, further comprising a nick guide RNA (ngRNA), wherein the ngRNA comprises an ng spacer that comprises a region of complementarity to a second search target sequence in the SLC37A4 gene, and wherein the second search target sequence is on the non-target strand of the SLC37A4 gene.

44. (canceled)

45. The PEgRNA system of claim 43, wherein the ng spacer comprises a sequence listed in Table 8a, Table 8b, Table 8c, or Table 8d.

46. The PEgRNA system of claim 45, wherein: (a) the PEgRNA comprises RTT and PBS sequences listed together in Table 9c, Table 10c, Table 11c, Table 12c, Table 13c, Table 14c, Table 19c, Table 20c, or Table 21c, and the ngRNA comprises a sequence listed in Table 8a or Table 8c; or (b) the PEgRNA comprises RTT and PBS sequences listed in Table 15c, Table 16c, Table 17c, Table 18c, Table 22c, Table 23c, Table 24c and the ngRNA comprises a sequence listed in Table 8b or Table 8d.

47. (canceled)

48. A prime editing system comprising: (i) the PEgRNA of claim 2; and (ii) the prime editor comprising the DNA binding domain and the DNA polymerase domain, or one or more nucleotides encoding the prime editor.

49.-90. (canceled)

91. The prime editing system of claim 48, wherein the DNA binding domain is a Cas9 having nickase activity and wherein the DNA polymerase domain is a reverse transcriptase.

92. A prime editing system comprising: (i) the PEgRNA of claim 43; and (ii) the prime editor comprising the DNA binding domain and the DNA polymerase domain, or one or more nucleotides encoding the prime editor.

93. The prime editing system of claim 92, wherein the DNA binding domain is a Cas9 having nickase activity and wherein the DNA polymerase domain is a reverse transcriptase.

94. A lipid nanoparticle (LNP) or ribonucleoprotein (RNP) comprising the prime editing complex system of claim 43, or a component thereof.

95. A lipid nanoparticle (LNP) or ribonucleoprotein (RNP) comprising the prime editing complex system of claim 48, or a component thereof.

96. A method for editing an SLC37A4 gene, the method comprising contacting the SLC37A4 gene with:
(a) a Prime Editing guide RNA (PEgRNA), or one or more nucleic acids encoding the pegRNA, the pegRNA comprising:
(i) a spacer that comprises a region of complementarity to a search target sequence on a target strand of an SLC37A4 gene,
(ii) an editing template that comprises an intended nucleotide edit compared to the SLC37A4 gene and a region of complementarity to an editing target sequence on a non-target strand of the SLC37A4 gene,
(iii) a primer binding site (PBS) that comprises a region of complementarity to a region immediately upstream of a nick site in the non-target strand, and
(iv) a gRNA core that associates with a prime editor comprising a DNA binding domain and a DNA polymerase domain; and
(b) a prime editor, or one or more nucleic acids encoding the prime editor, the prime editor comprising a DNA binding domain and a DNA polymerase domain;
wherein the target strand and the non-target strand are complementary to each other, and
wherein the editing target sequence comprises:
(i) a codon encoding cysteine corresponding to position 339 of a SLC37A4 wild-type peptide and the intended nucleotide edit comprises a T>G nucleotide substitution at position 1015 in the coding sequence of the SLC37A4 gene, or
(ii) a 2-nucleotide deletion corresponding to positions 1042-1043 of a coding sequence of an SLC37A4 wild-type gene, and wherein the intended nucleotide edit comprises a CT insertion at the position corresponding to 1042 of the coding sequence of the SLC37A4 wild-type gene.

The application's sequence listing, which the Patent Office published only in electronic form, follows.

SEQUENCE LISTING (6122 sequences)

SEQ ID NO: 1 - protein, 429 aa, Homo sapiens
MAAQGYGYYRTVIFSAMFGGYSLYYFNRKTFSFVMPSLVEEIPLDKDDLGFITSSQSAAYAISKFVSGVLSDQMSARWLFSSGLLLVGLVNIFFAWSSTVPVFAALWFLNGLAQGLGWPPCGKVLRKWFEPSQFGTWWAILSTSMNLAGGLGPILATILAQSYSWRSTLALSGALCVVVSFLCLLLIHNEPADVGLRNLDPMPSEGKKGSLKEESTLQELLLSPYLWVLSTGYLVVFGVKTCCTDWGQFFLIQEKGQSALVGSSYMSALEVGGLVGSIAAGYLSDRAMAKAGLSNYGNPRHGLLLFMMAGMTVSMYLFRVTVTSDSPKLWILVLGAVFGFSSYGPIALFGVIANESAPPNLCGTSHAIVGLMANVGGFLAGLPFSTIAKHYSWSTAFWVAEVICAASTAAFFLLRNIRTKMGRVSKKAE

SEQ ID NO: 2 - RNA, 2816 nt, Homo sapiens
  source 1..2816: mol_type = mRNA
gtcctattcgggctcccgcctctgttcagttccagagacaattcatgggtcttggggccaccgaggcgctgtccctgaccaccagcacgagacccctttctatcgcgccagtcctgtggtctccgcacctctccagctcctgcacccccggcccccgtggttcccagccgcacagtagcgtgtcctgggtagcgtgaggacccacggggctgggcaggtgccacgagcccgccgcctcttcgccgcccgccgcctctcctcctctcccgcccgccgcctggccctcccctaccaggctgagcctctgggtgccagaagcgcggggcctccgggagaatacgtgcggtcgcccgctccgcgtgcgcctacgccttctgctccagttgctttcccaattgagcggaaaagccggggcatgttgccggggccctgggcgggacggttgtgccctgcagcccgaagcccgccggggcaccttcccgcccacgagctgcccagtccctctgcttgcggcccctgccaacgtcccacaggacactgggtccccttggagcctccccaggcttaatgattgtccagaaggcggctataaagggagcctgggaggctgggtggaggagggagcagaaaaaacccaactcagcagatctgggaactgtgagagcggcaagcaggaactgtggtcagaggctgtgcgtcttggctggtagggcctgctcttttctaccatggcagcccagggctatggctattatcgcactgtgatcttctcagccatgtttgggggctacagcctgtattacttcaatcgcaagaccttctcctttgtcatgccatcattggtggaagagatccctttggacaaggatgatttggggttcatcaccagcagccagtcggcagcttatgctatcagcaagtttgtcagtggggtgctgtctgaccagatgagtgctcgctggctcttctcttctgggctgctcctggttggcctggtcaacatattctttgcctggagctccacagtacctgtctttgctgccctctggttccttaatggcctggcccaggggctgggctggcccccatgtgggaaggtcctgcggaagtggtttgagccatctcagtttggcacttggtgggccatcctgtcaaccagcatgaacctggctggagggctgggccctatcctggcaaccatccttgcccagagctacagctggcgcagcacgctggccctatctggggcactgtgtgtggttgtctccttcctctgtctcctgctcatccacaatgaacctgctgatgttggactccgcaacctggaccccatgccctctgagggcaagaagggctccttgaaggaggagagcaccctgcaggagctgctgctgtccccttacctgtgggtgctctccactggttaccttgtggtgtttggagtaaagacctgctgtactgactggggccagttcttccttatccaggagaaaggacagtcagcccttgtaggtagctcctacatgagtgccctggaagttgggggccttgtaggcagcatcgcagctggctacctgtcagaccgggccatggcaaaggcgggactgtccaactacgggaaccctcgccatggcctgttgctgttcatgatggctggcatgacagtgtccatgtacctcttccgggtaacagtgaccagtgactcccccaagctctggatcctggtattgggagctgtatttggtttctcctcgtatggccccattgccctgtttggagtcatagccaacgagagtgcccctcccaacttgtgtggcacctcccacgccattgtgggactcatggccaatgtgggcggctttctggctgggctgcccttcagcaccattgccaagcactacagttggagcacagccttctgggtggctgaagtgatttgtgcggccagcacggctgccttcttcctcctacgaaacatccgcaccaagatgggccgagtgtccaagaaggctgagtgaagagagtccaggttccggagcaccatcccacggtggccttccccctgcacgctctgcggggagaaaaggaggggcctgcctggctagccctgaacctttcactttccatttctgcgccttttctgtcacccgggtggcgctggaagttatcagtggctagtgaggtcccagctccctgatcctatgctctatttaaaagataacctttggccttagactccgttagctcctatttcctgccttcagacaaacaggaaacttctgcagtcaggaaggctcctgtacccttcttcttttcctaggccctgtcctgcccgcatcctaccccatccccacctgaagtgaggctatccctgcagctgcagggcactaatgacccttgacttctgctgggtcctaagtcctctcagcagtgggtgactgctgttgccaatacctcagactccagggaaagagaggaggccatcattctcactgtaccactaggcgcagttggatataggtgggaagaaaaggtgacttgttatagaagattaaaactagatttgatactgaacactgtcagtgattcattttttcaaagtgagacagcttccttgggaaatattgtcaatacctgctctttccaccccaaaatggaaagacttcatttccctggaatggggaagctgaagtgtagatggactcctttaaaactcatgcctcctctgccttcacctgaacattgaatagttcaatgattattttagagataaagctattgggttgtggacagattaaataacttgatggagggaa

SEQ ID NO: 3-6 - skipped (4 entries)

SEQ ID NO: 7 - protein, 30 aa, synthetic construct
MDSLLMNRRKFLYQFKNVRWAKGRRETYLC

SEQ ID NO: 8 - protein, 18 aa, synthetic construct
KRTADGSEFESPKKKRKV

SEQ ID NO: 9 - protein, 17 aa, synthetic construct
KRTADGSEFEPKKKRKV

SEQ ID NO: 10 - protein, 19 aa, synthetic construct
NLSKRPAAIKKAGQAKKKK

SEQ ID NO: 11 - protein, 11 aa, synthetic construct
RQRRNELKRSF

SEQ ID NO: 12 - protein, 38 aa, synthetic construct
NQSSNFGPMKGGNFGGRSSGPYGGGGQYFAKPRNQGGY

SEQ ID NO: 13 - protein, 7 aa, synthetic construct
PKKKRKV

SEQ ID NO: 14 - protein, 16 aa, synthetic construct
KRXXXXXXXXXXKKKL

SEQ ID NO: 15 - protein, 16 aa, synthetic construct
KRPAATKKAGQAKKKK

SEQ ID NO: 16 - protein, 7 aa, synthetic construct
PKKKRKV

SEQ ID NO: 17 - protein, 19 aa, synthetic construct
MKRTADGSEFESPKKKRKV

SEQ ID NO: 18 - protein, 20 aa, synthetic construct
AVKRPAATKKAGQAKKKKLD

SEQ ID NO: 19 - protein, 25 aa, synthetic construct
MSRRRKANPTKLSENAKKLAKEVEN

SEQ ID NO: 20 - protein, 9 aa, synthetic construct
PAAKRVKLD

SEQ ID NO: 21 - protein, 9 aa, synthetic construct
KLKIKRPVK

SEQ ID NO: 22 - protein, 8 aa, synthetic construct
VSRKRPRP

SEQ ID NO: 23 - protein, 10 aa, synthetic construct
EGAPPAKRAR

SEQ ID NO: 24 - protein, 12 aa, synthetic construct
PPQPKKKPLDGE

SEQ ID NO: 25 - protein, 21 aa, synthetic construct
SGGSKRTADGSEFEPKKKRKV

SEQ ID NO: 26 - RNA, 33 nt, synthetic construct
  source 1..33: mol_type = other RNA
gccaacatgaggatcacccatgtctgcagggcc

SEQ ID NO: 27 - protein, 131 aa, synthetic construct
GSASNFTQFVLVDNGGTGDVTVAPSNFANGVAEWISSNSRSQAYKVTCSVRQSSAQNRKYTIKVEVPKVATQTVGGEELPVAGWRSYLNMELTIPIFATNSDCELIVKAMQGLLKDGNPIPSAIAANSGIY

SEQ ID NO: 28 - protein, 150 aa, synthetic construct
  VARIANT 5..150: note = GGGGS repeats may be deleted
GGGGSGGGGSGGGGSGGGGSGGGGSGGGGSGGGGSGGGGSGGGGSGGGGSGGGGSGGGGSGGGGSGGGGSGGGGSGGGGSGGGGSGGGGSGGGGSGGGGSGGGGSGGGGSGGGGSGGGGSGGGGSGGGGSGGGGSGGGGSGGGGSGGGGS

SEQ ID NO: 29 - protein, 30 aa, synthetic construct
  VARIANT 2..30: note = Residues may be deleted
GGGGGGGGGGGGGGGGGGGGGGGGGGGGGG

SEQ ID NO: 30 - protein, 150 aa, synthetic construct
  VARIANT 6..150: note = EAAAK repeats may be deleted
EAAAKEAAAKEAAAKEAAAKEAAAKEAAAKEAAAKEAAAKEAAAKEAAAKEAAAKEAAAKEAAAKEAAAKEAAAKEAAAKEAAAKEAAAKEAAAKEAAAKEAAAKEAAAKEAAAKEAAAKEAAAKEAAAKEAAAKEAAAKEAAAKEAAAK

SEQ ID NO: 31 - protein, 90 aa, synthetic construct
  VARIANT 4..90: note = GGS repeats may be deleted
GGSGGSGGSGGSGGSGGSGGSGGSGGSGGSGGSGGSGGSGGSGGSGGSGGSGGSGGSGGSGGSGGSGGSGGSGGSGGSGGSGGSGGSGGS

SEQ ID NO: 32 - protein, 120 aa, synthetic construct
  VARIANT 5..120: note = SGGS repeats may be deleted
SGGSSGGSSGGSSGGSSGGSSGGSSGGSSGGSSGGSSGGSSGGSSGGSSGGSSGGSSGGSSGGSSGGSSGGSSGGSSGGSSGGSSGGSSGGSSGGSSGGSSGGSSGGSSGGSSGGSSGGS

SEQ ID NO: 33 - protein, 60 aa, synthetic construct
  VARIANT 3..60: note = XP repeats may be deleted and wherein X can be any amino acid
XPXPXPXPXPXPXPXPXPXPXPXPXPXPXPXPXPXPXPXPXPXPXPXPXPXPXPXPXPXP

SEQ ID NO: 34 - protein, 90 aa, synthetic construct; identical to SEQ ID NO: 31
  VARIANT 4..90: note = 6 or 4 GGS repeats may be deleted

SEQ ID NO: 35 - protein, 16 aa, synthetic construct
SGSETPGTSESATPES

SEQ ID NO: 36 - protein, 21 aa, synthetic construct
ETPGTSESATPESSGGSSGGS

SEQ ID NO: 37 - protein, 10 aa, synthetic construct
SGGSGGSGGS

SEQ ID NO: 38 - protein, 4 aa, synthetic construct
SGGS

SEQ ID NO: 39 - protein, 60 aa, synthetic construct
SGGSSGGSSGSETPGTSESATPESAGSYPYDVPDYAGSAAPAAKKKKLDGSGSGGSSGGS

SEQ ID NO: 40 - protein, 16 aa, synthetic construct
SGSETPGTSESATPES

SEQ ID NO: 41 - protein, 32 aa, synthetic construct
SGGSSGGSSGSETPGTSESATPESSGGSSGGS

SEQ ID NO: 42 - protein, 10 aa, synthetic construct
SGGSGGSGGS

SEQ ID NO: 43 - protein, 4 aa, synthetic construct
SGGS

SEQ ID NO: 44 - protein, 6 aa, synthetic construct
GGSGGS

SEQ ID NO: 45 - protein, 9 aa, synthetic construct
GGSGGSGGS

SEQ ID NO: 46 - protein, 60 aa, synthetic construct; identical to SEQ ID NO: 39

SEQ ID NO: 47 - protein, 33 aa, synthetic construct
SGGSSGGSSGSETPGTSESATPESSGGSSGGSS

SEQ ID NO: 48 - protein, 503 aa, synthetic construct
TLNIEDEYRLHETSKEPDVSLGSTWLSDFPQAWAETGGMGLAVRQAPLIIPLKATSTPVSIKQYPMSQEARLGIKPHIQRLLDQGILVPCQSPWNTPLLPVKKPGTNDYRPVQDLREVNKRVEDIHPTVPNPYNLLSGLPPSHQWYTVLDLKDAFFCLRLHPTSQPLFAFEWRDPEMGISGQLTWTRLPQGFKNSPTLFNEALHRDLADFRIQHPDLILLQYVDDLLLAATSELDCQQGTRALLQTLGNLGYRASAKKAQICQKQVKYLGYLLKEGQRWLTEARKETVMGQPTPKTPRQLREFLGKAGFCRLFIPGFAEMAAPLYPLTKPGTLFNWGPDQQKAYQEIKQALLTAPALGLPDLTKPFELFVDEKQGYAKGVLTQKLGPWRRPVAYLSKKLDPVAAGWPPCLRMVAAIAVLTKDAGKLTMGQPLVILAPHAVEALVKQPPDRWLSNARMTHYQALLLDTDRVQFGPVVALNPATLLPLPEEGLQHNCLDNSRLIN

SEQ ID NO: 49 - protein, 677 aa, synthetic construct
TLNIEDEYRLHETSKEPDVSLGSTWLSDFPQAWAETGGMGLAVRQAPLIIPLKATSTPVSIKQYPMSQEARLGIKPHIQRLLDQGILVPCQSPWNTPLLPVKKPGTNDYRPVQDLREVNKRVEDIHPTVPNPYNLLSGLPPSHQWYTVLDLKDAFFCLRLHPTSQPLFAFEWRDPEMGISGQLTWTRLPQGFKNSPTLFNEALHRDLADFRIQHPDLILLQYVDDLLLAATSELDCQQGTRALLQTLGNLGYRASAKKAQICQKQVKYLGYLLKEGQRWLTEARKETVMGQPTPKTPRQLREFLGKAGFCRLFIPGFAEMAAPLYPLTKPGTLFNWGPDQQKAYQEIKQALLTAPALGLPDLTKPFELFVDEKQGYAKGVLTQKLGPWRRPVAYLSKKLDPVAAGWPPCLRMVAAIAVLTKDAGKLTMGQPLVILAPHAVEALVKQPPDRWLSNARMTHYQALLLDTDRVQFGPVVALNPATLLPLPEEGLQHNCLDILAEAHGTRPDLTDQPLPDADHTWYTDGSSLLQEGQRKAGAAVTTETEVIWAKALPAGTSAQRAELIALTQALKMAEGKKLNVYTDSRYAFATAHIHGEIYRRRGWLTSEGKEIKNKDEILALLKALFLPKRLSIIHCPGHQKGHSAEARGNRMADQAARKAAITETPDTSTLLIENSSP

SEQ ID NO: 50 - protein, 677 aa, Moloney murine leukemia virus
TLNIEDEYRLHETSKEPDVSLGSTWLSDFPQAWAETGGMGLAVRQAPLIIPLKATSTPVSIKQYPMSQEARLGIKPHIQRLLDQGILVPCQSPWNTPLLPVKKPGTNDYRPVQDLREVNKRVEDIHPTVPNPYNLLSGLPPSHQWYTVLDLKDAFFCLRLHPTSQPLFAFEWRDPEMGISGQLTWTRLPQGFKNSPTLFDEALHRDLADFRIQHPDLILLQYVDDLLLAATSELDCQQGTRALLQTLGNLGYRASAKKAQICQKQVKYLGYLLKEGQRWLTEARKETVMGQPTPKTPRQLREFLGTAGFCRLWIPGFAEMAAPLYPLTKTGTLFNWGPDQQKAYQEIKQALLTAPALGLPDLTKPFELFVDEKQGYAKGVLTQKLGPWRRPVAYLSKKLDPVAAGWPPCLRMVAAIAVLTKDAGKLTMGQPLVILAPHAVEALVKQPPDRWLSNARMTHYQALLLDTDRVQFGPVVALNPATLLPLPEEGLQHNCLDILAEAHGTRPDLTDQPLPDADHTWYTDGSSLLQEGQRKAGAAVTTETEVIWAKALPAGTSAQRAELIALTQALKMAEGKKLNVYTDSRYAFATAHIHGEIYRRRGLLTSEGKEIKNKDEILALLKALFLPKRLSIIHCPGHQKGHSAEARGNRMADQAARKAAITETPDTSTLLIENSSP

SEQ ID NO: 51 - protein, 1368 aa, Streptococcus pyogenes [sequence omitted]

SEQ ID NO: 52 - protein, 1052 aa, Staphylococcus lugdunensis
MKRNYILGLDIGITSVGYGIIDYETRDVIDAGVRLFKEANVENNEGRRSKRGARRLKRRRRHRIQRVKKLLFDYNLLTDHSELSGINPYEARVKGLSQKLSEEEFSAALLHLAKRRGVHNVNEVEEDTGNELSTKEQISRNSKALEEKYVAELQLERLKKDGEVRGSINRFKTSDYVKEAKQLLKVQKAYHQLDQSFIDTYIDLLETRRTYYEGPGEGSPFGWKDIKEWYEMLMGHCTYFPEELRSVKYAYNADLYNALNDLNNLVITRDENEKLEYYEKFQIIENVFKQKKKPTLKQIAKEILVNEEDIKGYRVTSTGKPEFTNLKVYHDIKDITARKEIIENAELLDQIAKILTIYQSSEDIQEELTNLNSELTQEEIEQISNLKGYTGTHNLSLKAINLILDELWHTNDNQIAIFNRLKLVPKKVDLSQQKEIPTTLVDDFILSPVVKRSFIQSIKVINAIIKKYGLPNDIIIELAREKNSKDAQKMINEMQKRNRQTNERIEEIIRTTGKENAKYLIEKIKLHDMQEGKCLYSLEAIPLEDLLNNPFNYEVDHIIPRSVSFDNSFNNKVLVKQEEASKKGNRTPFQYLSSSDSKISYETFKKHILNLAKGKGRISKTKKEYLLEERDINRFSVQKDFINRNLVDTRYATRGLMNLLRSYFRVNNLDVKVKSINGGFTSFLRRKWKFKKERNKGYKHHAEDALIIANADFIFKEWKKLDKAKKVMENQMFEEKQAESMPEIETEQEYKEIFITPHQIKHIKDFKDYKYSHRVDKKPNRELINDTLYSTRKDDKGNTLIVNNLNGLYDKDNDKLKKLINKSPEKLLMYHHDPQTYQKLKLIMEQYGDEKNPLYKYYEETGNYLTKYSKKDNGPVIKKIKYYGNKLNAHLDITDDYPNSRNKVVKLSLKPYRFDVYLDNGVYKFVTVKNLDVIKKENYYEVNSKCYEEAKKLKKISNQAEFIASFYNNDLIKINGELYRVIGVNNDLLNRIEVNMIDITYREYLENMNDKRPPRIIKTIASKTQSIKKYSTDILGNLYEVKSKKHPQIIKK

SEQ ID NO: 53 - protein, 2117 aa, synthetic construct
MKRTADGSEFESPKKKRKVDKKYSIGLDIGTNSVGWAVITDEYKVPSKKFKVLGNTDRHSIKKNLIGALLFDSGETAEATRLKRTARRRYTRRKNRICYLQEIFSNEMAKVDDSFFHRLEESFLVEEDKKHERHPIFGNIVDEVAYHEKYPTIYHLRKKLVDSTDKADLRLIYLALAHMIKFRGHFLIEGDLNPDNSDVDKLFIQLVQTYNQLFEENPINASGVDAKAILSARLSKSRRLENLIAQLPGEKKNGLFGNLIALSLGLTPNFKSNFDLAEDAKLQLSKDTYDDDLDNLLAQIGDQYADLFLAAKNLSDAILLSDILRVNTEITKAPLSASMIKRYDEHHQDLTLLKALVRQQLPEKYKEIFFDQSKNGYAGYIDGGASQEEFYKFIKPILEKMDGTEELLVKLNREDLLRKQRTFDNGSIPHQIHLGELHAILRRQEDFYPFLKDNREKIEKILTFRIPYYVGPLARGNSRFAWMTRKSEETITPWNFEEVVDKGASAQSFIERMTNFDKNLPNEKVLPKHSLLYEYFTVYNELTKVKYVTEGMRKPAFLSGEQKKAIVDLLFKTNRKVTVKQLKEDYFKKIECFDSVEISGVEDRFNASLGTYHDLLKIIKDKDFLDNEENEDILEDIVLTLTLFEDREMIEERLKTYAHLFDDKVMKQLKRRRYTGWGRLSRKLINGIRDKQSGKTILDFLKSDGFANRNFMQLIHDDSLTFKEDIQKAQVSGQGDSLHEHIANLAGSPAIKKGILQTVKVVDELVKVMGRHKPENIVIEMARENQTTQKGQKNSRERMKRIEEGIKELGSQILKEHPVENTQLQNEKLYLYYLQNGRDMYVDQELDINRLSDYDVDAIVPQSFLKDDSIDNKVLTRSDKNRGKSDNVPSEEVVKKMKNYWRQLLNAKLITQRKFDNLTKAERGGLSELDKAGFIKRQLVETRQITKHVAQILDSRMNTKYDENDKLIREVKVITLKSKLVSDFRKDFQFYKVREINNYHHAHDAYLNAVVGTALIKKYPKLESEFVYGDYKVYDVRKMIAKSEQEIGKATAKYFFYSNIMNFFKTEITLANGEIRKRPLIETNGETGEIVWDKGRDFATVRKVLSMPQVNIVKKTEVQTGGFSKESILPKRNSDKLIARKKDWDPKKYGGFDSPTVAYSVLVVAKVEKGKSKKLKSVKELLGITIMERSSFEKNPIDFLEAKGYKEVKKDLIIKLPKYSLFELENGRKRMLASAGELQKGNELALPSKYVNFLYLASHYEKLKGSPEDNEQKQLFVEQHKHYLDEIIEQISEFSKRVILADANLDKVLSAYNKHRDKPIREQAENIIHLFTLTNLGAPAAFKYFDTTIDRKRYTSTKEVLDATLIHQSITGLYETRIDLSQLGGDSGGSSGGSSGSETPGTSESATPESSGGSSGGSSTLNIEDEYRLHETSKEPDVSLGSTWLSDFPQAWAETGGMGLAVRQAPLIIPLKATSTPVSIKQYPMSQEARLGIKPHIQRLLDQGILVPCQSPWNTPLLPVKKPGTNDYRPVQDLREVNKRVEDIHPTVPNPYNLLSGLPPSHQWYTVLDLKDAFFCLRLHPTSQPLFAFEWRDPEMGISGQLTWTRLPQGFKNSPTLFNEALHRDLADFRIQHPDLILLQYVDDLLLAATSELDCQQGTRALLQTLGNLGYRASAKKAQICQKQVKYLGYLLKEGQRWLTEARKETVMGQPTPKTPRQLREFLGKAGFCRLFIPGFAEMAAPLYPLTKPGTLFNWGPDQQKAYQEIKQALLTAPALGLPDLTKPFELFVDEKQGYAKGVLTQKLGPWRRPVAYLSKKLDPVAAGWPPCLRMVAAIAVLTKDAGKLTMGQPLVILAPHAVEALVKQPPDRWLSNARMTHYQALLLDTDRVQFGPVVALNPATLLPLPEEGLQHNCLDILAEAHGTRPDLTDQPLPDADHTWYTDGSSLLQEGQRKAGAAVTTETEVIWAKALPAGTSAQRAELIALTQALKMAEGKKLNVYTDSRYAFATAHIHGEIYRRRGWLTSEGKEIKNKDEILALLKALFLPKRLSIIHCPGHQKGHSAEARGNRMADQAARKAAITETPDTSTLLIENSSPSGGSKRTADGSEFEPKKKRKV

SEQ ID NO: 54 - RNA, 76 nt, synthetic construct
  source 1..76: mol_type = other RNA
gttttagagctagaaatagcaagttaaaataaggctagtccgttatcaacttgaaaaagtggcaccgagtcggtgc

SEQ ID NO: 55 - RNA, 76 nt, synthetic construct
  source 1..76: mol_type = other RNA
gtttgagagctagaaatagcaagtttaaataaggctagtccgttatcaacttgaaaaagtgggaccgagtcggtcc

SEQ ID NO: 56 - RNA, 86 nt, synthetic construct
  source 1..86: mol_type = other RNA
gtttaagagctatgctggaaacagcatagcaagtttaaataaggctagtccgttatcaacttgaaaaagtggcaccgagtcggtgc

SEQ ID NO: 57 - RNA, 30 nt, synthetic construct
  source 1..30: mol_type = other RNA
aacattgacgcgtctctacgtgggggcgcg

SEQ ID NO: 58 - protein, 1367 aa, synthetic construct
DKKYSIGLDIGTNSVGWAVITDEYKVPSKKFKVLGNTDRHSIKKNLIGALLFDSGETAEATRLKRTARRRYTRRKNRICYLQEIFSNEMAKVDDSFFHRLEESFLVEEDKKHERHPIFGNIVDEVAYHEKYPTIYHLRKKLVDSTDKADLRLIYLALAHMIKFRGHFLIEGDLNPDNSDVDKLFIQLVQTYNQLFEENPINASGVDAKAILSARLSKSRRLENLIAQLPGEKKNGLFGNLIALSLGLTPNFKSNFDLAEDAKLQLSKDTYDDDLDNLLAQIGDQYADLFLAAKNLSDAILLSDILRVNTEITKAPLSASMIKRYDEHHQDLTLLKALVRQQLPEKYKEIFFDQSKNGYAGYIDGGASQEEFYKFIKPILEKMDGTEELLVKLNREDLLRKQRTFDNGSIPHQIHLGELHAILRRQEDFYPFLKDNREKIEKILTFRIPYYVGPLARGNSRFAWMTRKSEETITPWNFEEVVDKGASAQSFIERMTNFDKNLPNEKVLPKHSLLYEYFTVYNELTKVKYVTEGMRKPAFLSGEQKKAIVDLLFKTNRKVTVKQLKEDYFKKIECFDSVEISGVEDRFNASLGTYHDLLKIIKDKDFLDNEENEDILEDIVLTLTLFEDREMIEERLKTYAHLFDDKVMKQLKRRRYTGWGRLSRKLINGIRDKQSGKTILDFLKSDGFANRNFMQLIHDDSLTFKEDIQKAQVSGQGDSLHEHIANLAGSPAIKKGILQTVKVVDELVKVMGRHKPENIVIEMARENQTTQKGQKNSRERMKRIEEGIKELGSQILKEHPVENTQLQNEKLYLYYLQNGRDMYVDQELDINRLSDYDVDAIVPQSFLKDDSIDNKVLTRSDKNRGKSDNVPSEEVVKKMKNYWRQLLNAKLITQRKFDNLTKAERGGLSELDKAGFIKRQLVETRQITKHVAQILDSRMNTKYDENDKLIREVKVITLKSKLVSDFRKDFQFYKVREINNYHHAHDAYLNAVVGTALIKKYPKLESEFVYGDYKVYDVRKMIAKSEQEIGKATAKYFFYSNIMNFFKTEITLANGEIRKRPLIETNGETGEIVWDKGRDFATVRKVLSMPQVNIVKKTEVQTGGFSKESILPKRNSDKLIARKKDWDPKKYGGFDSPTVAYSVLVVAKVEKGKSKKLKSVKELLGITIMERSSFEKNPIDFLEAKGYKEVKKDLIIKLPKYSLFELENGRKRMLASAGELQKGNELALPSKYVNFLYLASHYEKLKGSPEDNEQKQLFVEQHKHYLDEIIEQISEFSKRVILADANLDKVLSAYNKHRDKPIREQAENIIHLFTLTNLGAPAAFKYFDTTIDRKRYTSTKEVLDATLIHQSITGLYETRIDLSQLGGD

SEQ ID NO: 59 - protein, 33 aa, synthetic construct; identical to SEQ ID NO: 47

SEQ ID NO: 60 - RNA, 20 nt, synthetic construct
  source 1..20: mol_type = other RNA
cagggcaatggggccatacg

SEQ ID NO: 61 - RNA, 20 nt, synthetic construct
  source 1..20: mol_type = other RNA
tgactccaaacagggcaatg

SEQ ID NO: 62 - RNA, 20 nt, synthetic construct
  source 1..20: mol_type = other RNA
atgactccaaacagggcaat

SEQ ID NO: 63 - RNA, 20 nt, synthetic construct
  source 1..20: mol_type = other RNA
tatgactccaaacagggcaa

SEQ ID NO: 64 - RNA, 20 nt, synthetic construct
  source 1..20: mol_type = other RNA
gttggctatgactccaaaca

SEQ ID NO: 65 - RNA, 20 nt, synthetic construct
  source 1..20: mol_type = other RNA
cgttggctatgactccaaac

SEQ ID NO: 66 - RNA, 20 nt, synthetic construct
  source 1..20: mol_type = other RNA
cagctctggatcctggtatt

SEQ ID NO: 67 - RNA, 20 nt, synthetic construct
  source 1..20: mol_type = other RNA
gcagctctggatcctggtat

SEQ ID NO: 68 - RNA, 20 nt, synthetic construct
  source 1..20: mol_type = other RNA
cccttggcagctctggatcc

SEQ ID NO: 69 - RNA, 20 nt, synthetic construct
  source 1..20: mol_type = other RNA
cactctgcccttggcagctc

SEQ ID NO: 70 - RNA, 14 nt, synthetic construct
  source 1..14: mol_type = other RNA
tggtttctcctcgt

SEQ ID NO: 71 - RNA, 15 nt, synthetic construct
  source 1..15: mol_type = other RNA
ttggtttcagttcgt

SEQ ID NO: 72 - RNA, 15 nt, synthetic construct
  source 1..15: mol_type = other RNA
ttggtttctcttcgt

SEQ ID NO: 73 - RNA, 15 nt, synthetic construct
  source 1..15: mol_type = other RNA
ttggtttctcgtcgt

SEQ ID NO: 74 - RNA, 15 nt, synthetic construct
  source 1..15: mol_type = other RNA
ttggtttcagctcgt

SEQ ID NO: 75 - RNA, 15 nt, synthetic construct
  source 1..15: mol_type = other RNA
ttggtttctcatcgt

SEQ ID NO: 76 - RNA, 15 nt, synthetic construct
  source 1..15: mol_type = other RNA
ttggtttctcctcgt

SEQ ID NO: 77 - RNA, 16 nt, synthetic construct
  source 1..16: mol_type = other RNA
tttggtttctcctcgt

SEQ ID NO: 78 - RNA, 17 nt, synthetic construct
  source 1..17: mol_type = other RNA
atttggtttcagttcgt

SEQ ID NO: 79 - RNA, 17 nt, synthetic construct
  source 1..17: mol_type = other RNA
atttggtttctcttcgt

SEQ ID NO: 80 - RNA, 17 nt, synthetic construct
  source 1..17: mol_type = other RNA
atttggtttctcgtcgt

SEQ ID NO: 81 - RNA, 17 nt, synthetic construct
  source 1..17: mol_type = other RNA
atttggtttcagctcgt

SEQ ID NO: 82 - RNA, 17 nt, synthetic construct
  source 1..17: mol_type = other RNA
atttggtttctcatcgt

SEQ ID NO: 83 - RNA, 17 nt, synthetic construct
  source 1..17: mol_type = other RNA
atttggtttctcctcgt

SEQ ID NO: 84 - RNA, 18 nt, synthetic construct
  source 1..18: mol_type = other RNA
tatttggtttctcctcgt

SEQ ID NO: 85 - RNA, 19 nt, synthetic construct
  source 1..19: mol_type = other RNA
gtatttggtttcagttcgt

SEQ ID NO: 86 - RNA, 19 nt, synthetic construct
  source 1..19: mol_type = other RNA
gtatttggtttctcttcgt

SEQ ID NO: 87 - RNA, 19 nt, synthetic construct
  source 1..19: mol_type = other RNA
gtatttggtttctcgtcgt

SEQ ID NO: 88 - RNA, 19 nt, synthetic construct
  source 1..19: mol_type = other RNA
gtatttggtttcagctcgt

SEQ ID NO: 89 - RNA, 19 nt, synthetic construct
  source 1..19: mol_type = other RNA
gtatttggtttctcatcgt

SEQ ID NO: 90 - RNA, 19 nt, synthetic construct
  source 1..19: mol_type = other RNA
gtatttggtttctcctcgt

SEQ ID NO: 91 - RNA, 20 nt, synthetic construct
  source 1..20: mol_type = other RNA
tgtatttggtttctcctcgt

SEQ ID NO: 92 - RNA, 22 nt, synthetic construct
  source 1..22: mol_type = other RNA
gctgtatttggtttcagttcgt

SEQ ID NO: 93 - RNA, 22 nt, synthetic construct
  source 1..22: mol_type = other RNA
gctgtatttggtttctcttcgt

SEQ ID NO: 94 - RNA, 22 nt, synthetic construct
  source 1..22: mol_type = other RNA
gctgtatttggtttctcgtcgt

SEQ ID NO: 95 - RNA, 22 nt, synthetic construct
  source 1..22: mol_type = other RNA
gctgtatttggtttcagctcgt

SEQ ID NO: 96 - RNA, 22 nt, synthetic construct
  source 1..22: mol_type = other RNA
gctgtatttggtttctcatcgt

SEQ ID NO: 97 - RNA, 22 nt, synthetic construct
  source 1..22: mol_type = other RNA
gctgtatttggtttctcctcgt

SEQ ID NO: 98 - RNA, 23 nt, synthetic construct
  source 1..23: mol_type = other RNA
agctgtatttggtttctcctcgt

SEQ ID NO: 99 - RNA, 24 nt, synthetic construct
  source 1..24: mol_type = other RNA
gagctgtatttggtttctcctcgt

SEQ ID NO: 100 - RNA, 25 nt, synthetic construct
  source 1..25: mol_type = other RNA
ggagctgtatttggtttcagttcgt

SEQ ID NO: 101 - RNA, 25 nt, synthetic construct
  source 1..25: mol_type = other RNA
ggagctgtatttggtttctcttcgt

SEQ ID NO: 102 - RNA, 25 nt, synthetic construct
  source 1..25: mol_type = other RNA
ggagctgtatttggtttctcgtcgt

SEQ ID NO: 103 - RNA, 25 nt, synthetic construct
  source 1..25: mol_type = other RNA
ggagctgtatttggtttcagctcgt

SEQ ID NO: 104 - RNA, 25 nt, synthetic construct
  source 1..25: mol_type = other RNA
ggagctgtatttggtttctcatcgt

SEQ ID NO: 105 - RNA, 25 nt, synthetic construct
  source 1..25: mol_type = other RNA
ggagctgtatttggtttctcctcgt

SEQ ID NO: 106 - RNA, 26 nt, synthetic construct
  source 1..26: mol_type = other RNA
gggagctgtatttggtttctcctcgt

SEQ ID NO: 107 - RNA, 27 nt, synthetic construct
  source 1..27: mol_type = other RNA
tgggagctgtatttggtttcagttcgt

SEQ ID NO: 108 - RNA, 27 nt, synthetic construct
  source 1..27: mol_type = other RNA
tgggagctgtatttggtttctcttcgt

SEQ ID NO: 109 - RNA, 27 nt, synthetic construct
  source 1..27: mol_type = other RNA
tgggagctgtatttggtttctcgtcgt

SEQ ID NO: 110 - RNA, 27 nt, synthetic construct
  source 1..27: mol_type = other RNA
tgggagctgtatttggtttcagctcgt

SEQ ID NO: 111 - RNA, 27 nt, synthetic construct
  source 1..27: mol_type = other RNA
tgggagctgtatttggtttctcatcgt

SEQ ID NO: 112 - RNA, 27 nt, synthetic construct
  source 1..27: mol_type = other RNA
tgggagctgtatttggtttctcctcgt

SEQ ID NO: 113 - RNA, 28 nt, synthetic construct
  source 1..28: mol_type = other RNA
ttgggagctgtatttggtttctcctcgt

SEQ ID NO: 114 - RNA, 29 nt, synthetic construct
  source 1..29: mol_type = other RNA
attgggagctgtatttggtttctcctcgt

SEQ ID NO: 115 - RNA, 30 nt, synthetic construct
  source 1..30: mol_type = other RNA
tattgggagctgtatttggtttctcctcgt

SEQ ID NO: 116 - RNA, 31 nt, synthetic construct
  source 1..31: mol_type = other RNA
gtattgggagctgtatttggtttctcctcgt

SEQ ID NO: 117 - RNA, 32 nt, synthetic construct
  source 1..32: mol_type = other RNA
ggtattgggagctgtatttggtttctcctcgt

SEQ ID NO: 118 - RNA, 33 nt, synthetic construct
  source 1..33: mol_type = other RNA
tggtattgggagctgtatttggtttctcctcgt

SEQ ID NO: 119 - RNA, 36 nt, synthetic construct
  source 1..36: mol_type = other RNA
tcctggtattgggagctgtatttggtttctcctcgt

SEQ ID NO: 120 - RNA, 37 nt, synthetic construct
  source 1..37: mol_type = other RNA
atcctggtattgggagctgtatttggtttctcctcgt

SEQ ID NO: 121 - RNA, 24 nt, synthetic construct
  source 1..24: mol_type = other RNA
tggtttctcctcgtatggccccat

SEQ ID NO: 122 - RNA, 25 nt, synthetic construct
  source 1..25: mol_type = other RNA
ttggtttctcctcgtatggccccat

SEQ ID NO: 123 - RNA, 26 nt, synthetic construct
  source 1..26: mol_type = other RNA
tttggtttctcctcgtatggtcccat

SEQ ID NO: 124 - RNA, 26 nt, synthetic construct
  source 1..26: mol_type = other RNA
tttggtttctcctcgtatgggcccat

SEQ ID NO: 125 - RNA, 26 nt, synthetic construct
  source 1..26: mol_type = other RNA
tttggtttctcctcgtatggccccat

SEQ ID NO: 126 - RNA, 26 nt, synthetic construct
  source 1..26: mol_type = other RNA
tttggtttctcctcgtatggacccat

SEQ ID NO: 127 - RNA, 27 nt, synthetic construct
  source 1..27: mol_type = other RNA
atttggtttctcctcgtatggccccat

SEQ ID NO: 128 - RNA, 28 nt, synthetic construct
  source 1..28: mol_type = other RNA
tatttggtttctcctcgtatggccccat

SEQ ID NO: 129 - RNA, 29 nt, synthetic construct
  source 1..29: mol_type = other RNA
gtatttggtttctcctcgtatggtcccat

SEQ ID NO: 130 - RNA, 29 nt, synthetic construct
  source 1..29: mol_type = other RNA
gtatttggtttctcctcgtatgggcccat

SEQ ID NO: 131 - RNA, 29 nt, synthetic construct
  source 1..29: mol_type = other RNA
gtatttggtttctcctcgtatggccccat

SEQ ID NO: 132 - RNA, 29 nt, synthetic construct
  source 1..29: mol_type = other RNA
gtatttggtttctcctcgtatggacccat

SEQ ID NO: 133 - RNA, 30 nt, synthetic construct
  source 1..30: mol_type = other RNA
tgtatttggtttctcctcgtatggccccat

SEQ ID NO: 134 - RNA, 32 nt, synthetic construct
  source 1..32: mol_type = other RNA
gctgtatttggtttctcctcgtatggccccat

SEQ ID NO: 135 - RNA, 33 nt, synthetic construct
  source 1..33: mol_type = other RNA
agctgtatttggtttctcctcgtatggtcccat

SEQ ID NO: 136 - RNA, 33 nt, synthetic construct
  source 1..33: mol_type = other RNA
agctgtatttggtttctcctcgtatgggcccat

SEQ ID NO: 137 - RNA, 33 nt, synthetic construct
  source 1..33: mol_type = other RNA
agctgtatttggtttctcctcgtatggccccat

SEQ ID NO: 138 - RNA, 33 nt, synthetic construct
  source 1..33: mol_type = other RNA
agctgtatttggtttctcctcgtatggacccat

SEQ ID NO: 139 - RNA, 34 nt, synthetic construct
  source 1..34: mol_type = other RNA
gagctgtatttggtttctcctcgtatggccccat

SEQ ID NO: 140 - RNA, 35 nt, synthetic construct
  source 1..35: mol_type = other RNA
ggagctgtatttggtttctcctcgtatggccccat

SEQ ID NO: 141 - RNA, 36 nt, synthetic construct
  source 1..36: mol_type = other RNA
gggagctgtatttggtttctcctcgtatggtcccat

SEQ ID NO: 142 - RNA, 36 nt, synthetic construct
  source 1..36: mol_type = other RNA
gggagctgtatttggtttctcctcgtatgggcccat

SEQ ID NO: 143 - RNA, 36 nt, synthetic construct
  source 1..36: mol_type = other RNA
gggagctgtatttggtttctcctcgtatggccccat

SEQ ID NO: 144 - RNA, 36 nt, synthetic construct
  source 1..36: mol_type = other RNA
gggagctgtatttggtttctcctcgtatggacccat

SEQ ID NO: 145 - RNA, 37 nt, synthetic construct
  source 1..37: mol_type = other RNA
tgggagctgtatttggtttctcctcgtatggccccat

SEQ ID NO: 146 - RNA, 25 nt, synthetic construct
  source 1..25: mol_type = other RNA
tggtttctcctcgtatggccccatt

SEQ ID NO: 147 - RNA, 26 nt, synthetic construct
  source 1..26: mol_type = other RNA
ttggtttctcctcgtatggccccatt

SEQ ID NO: 148 - RNA, 27 nt, synthetic construct
  source 1..27: mol_type = other RNA
tttggtttctcctcgtatggccccatt

SEQ ID NO: 149 - RNA, 28 nt, synthetic construct
  source 1..28: mol_type = other RNA
atttggtttctcctcgtatggccccatt

SEQ ID NO: 150 - RNA, 29 nt, synthetic construct
  source 1..29: mol_type = other RNA
tatttggtttctcctcgtatggccccatt

SEQ ID NO: 151 - RNA, 30 nt, synthetic construct
  source 1..30: mol_type = other RNA
gtatttggtttctcctcgtatggccccatt

SEQ ID NO: 152 - RNA, 31 nt, synthetic construct
  source 1..31: mol_type = other RNA
tgtatttggtttctcctcgtatggccccatt

SEQ ID NO: 153 - RNA, 33 nt, synthetic construct
  source 1..33: mol_type = other RNA
gctgtatttggtttctcctcgtatggccccatt

SEQ ID NO: 154 - RNA, 34 nt, synthetic construct
  source 1..34: mol_type = other RNA
agctgtatttggtttctcctcgtatggccccatt

SEQ ID NO: 155 - RNA, 35 nt, synthetic construct
  source 1..35: mol_type = other RNA
gagctgtatttggtttctcctcgtatggccccatt

SEQ ID NO: 156 - RNA, 36 nt, synthetic construct
  source 1..36: mol_type = other RNA
ggagctgtatttggtttctcctcgtatggccccatt

SEQ ID NO: 157 - RNA, 37 nt, synthetic construct
  source 1..37: mol_type = other RNA
gggagctgtatttggtttctcctcgtatggccccatt

SEQ ID NO: 158 - RNA, 26 nt, synthetic construct
  source 1..26: mol_type = other RNA
tggtttctcctcgtatggccccattg

SEQ ID NO: 159 - RNA, 27 nt, synthetic construct
  source 1..27: mol_type = other RNA
ttggtttctcctcgtatggccccattg

SEQ ID NO: 160 - RNA, 28 nt, synthetic construct
  source 1..28: mol_type = other RNA
tttggtttctcctcgtatggccccattg

SEQ ID NO: 161 - RNA, 29 nt, synthetic construct
  source 1..29: mol_type = other RNA
atttggtttctcctcgtatggccccattg

SEQ ID NO: 162 - RNA, 30 nt, synthetic construct
  source 1..30: mol_type = other RNA
tatttggtttctcctcgtatggccccattg

SEQ ID NO: 163 - RNA, 31 nt, synthetic construct
  source 1..31: mol_type = other RNA
gtatttggtttctcctcgtatggccccattg

SEQ ID NO: 164 - RNA, 32 nt, synthetic construct
  source 1..32: mol_type = other RNA
tgtatttggtttctcctcgtatggccccattg

SEQ ID NO: 165 - RNA, 34 nt, synthetic construct
  source 1..34: mol_type = other RNA
gctgtatttggtttctcctcgtatggccccattg

SEQ ID NO: 166 - RNA, 35 nt, synthetic construct
  source 1..35: mol_type = other RNA
agctgtatttggtttctcctcgtatggccccattg

SEQ ID NO: 167 - RNA, 36 nt, synthetic construct
  source 1..36: mol_type = other RNA
gagctgtatttggtttctcctcgtatggccccattg

SEQ ID NO: 168 - RNA, 37 nt, synthetic construct
  source 1..37: mol_type = other RNA
ggagctgtatttggtttctcctcgtatggccccattg

SEQ ID NO: 169 - RNA, 32 nt, synthetic construct
  source 1..32: mol_type = other RNA
tggtttctcctcgtatggccccattgccctgt

SEQ ID NO: 170 - RNA, 33 nt, synthetic construct
  source 1..33: mol_type = other RNA
ttggtttctcctcgtatggccccattgccctgt

SEQ ID NO: 171 - RNA, 34 nt, synthetic construct
  source 1..34: mol_type = other RNA
tttggtttctcctcgtatggccccattgccctgt

SEQ ID NO: 172 - RNA, 35 nt, synthetic construct
  source 1..35: mol_type = other RNA
atttggtttctcctcgtatggccccattgccctgt

SEQ ID NO: 173 - RNA, 36 nt, synthetic construct
  source 1..36: mol_type = other RNA
tatttggtttctcctcgtatggccccattgccctgt

SEQ ID NO: 174 - RNA, 37 nt, synthetic construct
  source 1..37: mol_type = other RNA
gtatttggtttctcctcgtatggccccattgccctgt

SEQ ID NO: 175 - RNA, 33 nt, synthetic construct
  source 1..33: mol_type = other RNA
tggtttctcctcgtatggccccattgccctgtt

SEQ ID NO: 176 - RNA, 34 nt, synthetic construct
  source 1..34: mol_type = other RNA
ttggtttctcctcgtatggccccattgccctgtt

SEQ ID NO: 177 - RNA, 35 nt, synthetic construct
  source 1..35: mol_type = other RNA
tttggtttctcctcgtatggccccattgccctgtt

SEQ ID NO: 178 - RNA, 36 nt, synthetic construct
  source 1..36: mol_type = other RNA
atttggtttctcctcgtatggccccattgccctgtt

SEQ ID NO: 179 - RNA, 37 nt, synthetic construct
  source 1..37: mol_type = other RNA
tatttggtttctcctcgtatggccccattgccctgtt

SEQ ID NO: 180 - RNA, 19 nt, synthetic construct
  source 1..19: mol_type = other RNA
accaaatacagctcccaat

SEQ ID NO: 181 - RNA, 20 nt, synthetic construct
  source 1..20: mol_type = other RNA
aaccaaatacagctcccaat

SEQ ID NO: 182 - RNA, 21 nt, synthetic construct
  source 1..21: mol_type = other RNA
aaaccaaatacagctcccaat

SEQ ID NO: 183 - RNA, 22 nt, synthetic construct
  source 1..22: mol_type = other RNA
gaaaccaaatacagctcccaat

SEQ ID NO: 184 - RNA, 23 nt, synthetic construct
  source 1..23: mol_type = other RNA
agaaaccaaatacagctcccaat

SEQ ID NO: 185 - RNA, 24 nt, synthetic construct
  source 1..24: mol_type = other RNA
gagaaaccaaatacagctcccaat

SEQ ID NO: 186 - RNA, 25 nt, synthetic construct
  source 1..25: mol_type = other RNA
ggagaaaccaaatacagctcccaat

SEQ ID NO: 187 - RNA, 26 nt, synthetic construct
  source 1..26: mol_type = other RNA
aggagaaaccaaatacagctcccaat

SEQ ID NO: 188 - RNA, 27 nt, synthetic construct
  source 1..27: mol_type = other RNA
gaggagaaaccaaatacagctcccaat

SEQ ID NO: 189 - RNA, 29 nt, synthetic construct
  source 1..29: mol_type = other RNA
acgaggagaaaccaaatacagctcccaat

SEQ ID NO: 190 - RNA, 30 nt, synthetic construct
  source 1..30: mol_type = other RNA
tacgaggagaaaccaaatacagctcccaat

SEQ ID NO: 191 - RNA, 31 nt, synthetic construct
  source 1..31: mol_type = other RNA
atacgaggagaaaccaaatacagctcccaat

SEQ ID NO: 192 - RNA, 34 nt, synthetic construct
  source 1..34: mol_type = other RNA
gccatacgaggagaaaccaaatacagctcccaat

SEQ ID NO: 193 - RNA, 35 nt, synthetic construct
  source 1..35: mol_type = other RNA
ggccatacgaggagaaaccaaatacagctcccaat

SEQ ID NO: 194 - RNA, 36 nt, synthetic construct
  source 1..36: mol_type = other RNA
gggccatacgaggagaaaccaaatacagctcccaat

SEQ ID NO: 195 - RNA, 37 nt, synthetic construct
  source 1..37: mol_type = other RNA
ggggccatacgaggagaaaccaaatacagctcccaat

SEQ ID NO: 196 - RNA, 20 nt, synthetic construct
  source 1..20: mol_type = other RNA
accaaatacagctcccaata

SEQ ID NO: 197 - RNA, 21 nt, synthetic construct
  source 1..21: mol_type = other RNA
aaccaaatacagctcccaata

SEQ ID NO: 198 - RNA, 22 nt, synthetic construct
  source 1..22: mol_type = other RNA
aaaccaaatacagctcccaata

SEQ ID NO: 199 - RNA, 22 nt, synthetic construct
  source 1..22: mol_type = other RNA
aaaccaaatacagctcctaata

SEQ ID NO: 200 - RNA, 22 nt, synthetic construct
  source 1..22: mol_type = other RNA
aaaccaaatacagctccgaata

SEQ ID NO: 201 - RNA, 22 nt, synthetic construct
  source 1..22: mol_type = other RNA
aaaccaaatacagctccaaata

SEQ ID NO: 202 - RNA, 23 nt, synthetic construct
  source 1..23: mol_type = other RNA
gaaaccaaatacagctcccaata

SEQ ID NO: 203 - RNA, 24 nt, synthetic construct
  source 1..24: mol_type = other RNA
agaaaccaaatacagctcccaata

SEQ ID NO: 204 - RNA, 24 nt, synthetic construct
  source 1..24: mol_type = other RNA
agaaaccaaatacagctcctaata

SEQ ID NO: 205 - RNA, 24 nt, synthetic construct
  source 1..24: mol_type = other RNA
agaaaccaaatacagctccgaata

SEQ ID NO: 206 - RNA, 24 nt, synthetic construct
  source 1..24: mol_type = other RNA
agaaaccaaatacagctccaaata

SEQ ID NO: 207 - RNA, 25 nt, synthetic construct
  source 1..25: mol_type = other RNA
gagaaaccaaatacagctcccaata

SEQ ID NO: 208 - RNA, 26 nt, synthetic construct
  source 1..26: mol_type = other RNA
ggagaaaccaaatacagctcccaata

SEQ ID NO: 209 - RNA, 26 nt, synthetic construct
  source 1..26: mol_type = other RNA
ggagaaaccaaatacagctcctaata

SEQ ID NO: 210 - RNA, 26 nt, synthetic construct
  source 1..26: mol_type = other RNA
ggagaaaccaaatacagctccgaata

SEQ ID NO: 211 - RNA, 26 nt, synthetic construct
  source 1..26: mol_type = other RNA
ggagaaaccaaatacagctccaaata

SEQ ID NO: 212 - RNA, 27 nt, synthetic construct
  source 1..27: mol_type = other RNA
aggagaaaccaaatacagctcccaata

SEQ ID NO: 213 - RNA, 28 nt, synthetic construct
  source 1..28: mol_type = other RNA
gaggagaaaccaaatacagctcccaata

SEQ ID NO: 214 - RNA, 28 nt, synthetic construct
  source 1..28: mol_type = other RNA
gaggagaaaccaaatacagctcctaata

SEQ ID NO: 215 - RNA, 28 nt, synthetic construct
  source 1..28: mol_type = other RNA
gaggagaaaccaaatacagctccgaata

SEQ ID NO: 216 - RNA, 28 nt, synthetic construct
  source 1..28: mol_type = other RNA
gaggagaaaccaaatacagctccaaata

SEQ ID NO: 217 - RNA, 30 nt, synthetic construct
  source 1..30: mol_type = other RNA
acgaggagaaaccaaatacagctcccaata

SEQ ID NO: 218 - RNA, 31 nt, synthetic construct
  source 1..31: mol_type = other RNA
tacgaggagaaaccaaatacagctcccaata

SEQ ID NO: 219 - RNA, 31 nt, synthetic construct
  source 1..31: mol_type = other RNA
tacgaggagaaaccaaatacagctcctaata

SEQ ID NO: 220 - RNA, 31 nt, synthetic construct
  source 1..31: mol_type = other RNA
tacgaggagaaaccaaatacagctccgaata

SEQ ID NO: 221 - RNA, 31 nt, synthetic construct
  source 1..31: mol_type = other RNA
tacgaggagaaaccaaatacagctccaaata

SEQ ID NO: 222 - RNA, 32 nt, synthetic construct
  source 1..32: mol_type = other RNA
atacgaggagaaaccaaatacagctcccaata

SEQ ID NO: 223 - RNA, 35 nt, synthetic construct
  source 1..35: mol_type = other RNA
gccatacgaggagaaaccaaatacagctcccaata

SEQ ID NO: 224 - RNA, 36 nt, synthetic construct
  source 1..36: mol_type = other RNA
ggccatacgaggagaaaccaaatacagctcccaata

SEQ ID NO: 225 - RNA, 37 nt, synthetic construct
  source 1..37: mol_type = other RNA
gggccatacgaggagaaaccaaatacagctcccaata

SEQ ID NO: 226 - RNA, 26 nt, synthetic construct
  source 1..26: mol_type = other RNA
accaaatacagctcccaataccagga

SEQ ID NO: 227 - RNA, 27 nt, synthetic construct
  source 1..27: mol_type = other RNA
aaccaaatacagctcccaataccagga

SEQ ID NO: 228 - RNA, 28 nt, synthetic construct
  source 1..28: mol_type = other RNA
aaaccaaatacagctcccaataccagga

SEQ ID NO: 229 - RNA, 29 nt, synthetic construct
  source 1..29: mol_type = other RNA
gaaaccaaatacagctcccaataccagga

SEQ ID NO: 230 - RNA, 30 nt, synthetic construct
  source 1..30: mol_type = other RNA
agaaaccaaatacagctcccaataccagga

SEQ ID NO: 231 - RNA, 31 nt, synthetic construct
  source 1..31: mol_type = other RNA
gagaaaccaaatacagctcccaataccagga

SEQ ID NO: 232 - RNA, 32 nt, synthetic construct
  source 1..32: mol_type = other RNA
ggagaaaccaaatacagctcccaataccagga

SEQ ID NO: 233 - RNA, 33 nt, synthetic construct
  source 1..33: mol_type = other RNA
aggagaaaccaaatacagctcccaataccagga

SEQ ID NO: 234 - RNA, 34 nt, synthetic construct
  source 1..34: mol_type = other RNA
gaggagaaaccaaatacagctcccaataccagga

SEQ ID NO: 235 - RNA, 36 nt, synthetic construct
  source 1..36: mol_type = other RNA
acgaggagaaaccaaatacagctcccaataccagga

SEQ ID NO: 236 - RNA, 37 nt, synthetic construct
  source 1..37: mol_type = other RNA
tacgaggagaaaccaaatacagctcccaataccagga

SEQ ID NO: 237 - RNA, 33 nt, synthetic construct
  source 1..33: mol_type = other RNA
accaaatacagctcccaataccaggatccagag

SEQ ID NO: 238 - RNA, 34 nt, synthetic construct
  source 1..34: mol_type = other RNA
aaccaaatacagctcccaataccaggatccagag

SEQ ID NO: 239 - RNA, 35 nt, synthetic construct
  source 1..35: mol_type = other RNA
aaaccaaatacagctcccaataccaggatccagag

SEQ ID NO: 240 - RNA, 36 nt, synthetic construct
  source 1..36: mol_type = other RNA
gaaaccaaatacagctcccaataccaggatccagag

SEQ ID NO: 241 - RNA, 37 nt, synthetic construct
  source 1..37: mol_type = other RNA
agaaaccaaatacagctcccaataccaggatccagag

SEQ ID NO: 242-244 - skipped (3 entries)

SEQ ID NO: 245 - RNA, 10 nt, synthetic construct
  source 1..10: mol_type = other RNA
atggccccat

SEQ ID NO: 246 - RNA, 11 nt, synthetic construct
  source 1..11: mol_type = other RNA
atggccccatt

SEQ ID NO: 247 - RNA, 12 nt, synthetic construct
  source 1..12: mol_type = other RNA
atggccccattg

SEQ ID NO: 248 - RNA, 13 nt, synthetic construct
  source 1..13: mol_type = other RNA
atggccccattgc

SEQ ID NO: 249 - RNA, 14 nt, synthetic construct
  source 1..14: mol_type = other RNA
atggccccattgcc

SEQ ID NO: 250 - RNA, 15 nt, synthetic construct
  source 1..15: mol_type = other RNA
atggccccattgccc

SEQ ID NO: 251-253 - skipped (3 entries)

SEQ ID NO: 254 - RNA, 10 nt, synthetic construct
  source 1..10: mol_type = other RNA
tgccctgttt

SEQ ID NO: 255 - RNA, 11 nt, synthetic construct
  source 1..11: mol_type = other RNA
tgccctgtttg

SEQ ID NO: 256 - RNA, 12 nt, synthetic construct
  source 1..12: mol_type = other RNA
tgccctgtttgg

SEQ ID NO: 257 - RNA, 13 nt, synthetic construct
  source 1..13: mol_type = other RNA
tgccctgtttgga

SEQ ID NO: 258 - RNA, 14 nt, synthetic construct
  source 1..14: mol_type = other RNA
tgccctgtttggag

SEQ ID NO: 259 - RNA, 15 nt, synthetic construct
  source 1..15: mol_type = other RNA
tgccctgtttggagt

SEQ ID NO: 260-262 - skipped (3 entries)

SEQ ID NO: 263 - RNA, 10 nt, synthetic construct
  source 1..10: mol_type = other RNA
gccctgtttg

SEQ ID NO: 264 - RNA, 11 nt, synthetic construct
  source 1..11: mol_type = other RNA
gccctgtttgg

SEQ ID NO: 265 - RNA, 12 nt, synthetic construct
  source 1..12: mol_type = other RNA
gccctgtttgga

SEQ ID NO: 266 - RNA, 13 nt, synthetic construct
  source 1..13: mol_type = other RNA
gccctgtttggag

SEQ ID NO: 267 - RNA, 14 nt, synthetic construct
  source 1..14: mol_type = other RNA
gccctgtttggagt

SEQ ID NO: 268 - RNA, 15 nt, synthetic construct
  source 1..15: mol_type = other RNA
gccctgtttggagtc

SEQ ID NO: 269-271 - skipped (3 entries)

SEQ ID NO: 272 - RNA, 10 nt, synthetic construct
  source 1..10: mol_type = other RNA
ccctgtttgg

SEQ ID NO: 273 - RNA, 11 nt, synthetic construct
  source 1..11: mol_type = other RNA
ccctgtttgga

SEQ ID NO: 274 - RNA, 12 nt, synthetic construct
  source 1..12: mol_type = other RNA
ccctgtttggag

SEQ ID NO: 275 - RNA, 13 nt, synthetic construct
  source 1..13: mol_type = other RNA
ccctgtttggagt

SEQ ID NO: 276 - RNA, 14 nt, synthetic construct
  source 1..14: mol_type = other RNA
ccctgtttggagtc

SEQ ID NO: 277 - RNA, 15 nt, synthetic construct
  source 1..15: mol_type = other RNA
ccctgtttggagtca

SEQ ID NO: 278-280 - skipped (3 entries)

SEQ ID NO: 281 - RNA, 10 nt, synthetic construct
  source 1..10: mol_type = other RNA
ttggagtcat

SEQ ID NO: 282 - RNA, 11 nt, synthetic construct
  source 1..11: mol_type = other RNA
ttggagtcata

SEQ ID NO: 283 - RNA, 12 nt, synthetic construct
  source 1..12: mol_type = other RNA
ttggagtcatag

SEQ ID NO: 284 - RNA, 13 nt, synthetic construct
  source 1..13: mol_type = other RNA
ttggagtcatagc

SEQ ID NO: 285 - RNA, 14 nt, synthetic construct
  source 1..14: mol_type = other RNA
ttggagtcatagcc

SEQ ID NO: 286 - RNA, 15 nt, synthetic construct
  source 1..15: mol_type = other RNA
ttggagtcatagcca

SEQ ID NO: 287-289 - skipped (3 entries)

SEQ ID NO: 290 - RNA, 10 nt, synthetic construct
  source 1..10: mol_type = other RNA
tggagtcata

SEQ ID NO: 291 - RNA, 11 nt, synthetic construct
  source 1..11: mol_type = other RNA
tggagtcatag

SEQ ID NO: 292 - RNA, 12 nt, synthetic construct
  source 1..12: mol_type = other RNA
tggagtcatagc

SEQ ID NO: 293 - RNA, 13 nt, synthetic construct
  source 1..13: mol_type = other RNA
tggagtcatagcc

SEQ ID NO: 294 - RNA, 14 nt, synthetic construct
  source 1..14: mol_type = other RNA
tggagtcatagcca

SEQ ID NO: 295 - RNA, 15 nt, synthetic construct
  source 1..15: mol_type = other RNA
tggagtcatagccaa

SEQ ID NO: 296-298 - skipped (3 entries)

SEQ ID NO: 299 - RNA, 10 nt, synthetic construct
  source 1..10: mol_type = other RNA
accaggatcc

SEQ ID NO: 300 - RNA, 11 nt, synthetic construct
  source 1..11: mol_type = other RNA
accaggatcca

SEQ ID NO: 301 - RNA, 12 nt, synthetic construct
  source 1..12: mol_type = other RNA
accaggatccag

SEQ ID NO: 302 - RNA, 13 nt, synthetic construct
  source 1..13: mol_type = other RNA
accaggatccaga

SEQ ID NO: 303 - RNA, 14 nt, synthetic construct
  source 1..14: mol_type = other RNA
accaggatccagag

SEQ ID NO: 304 - RNA, 15 nt, synthetic construct
  source 1..15: mol_type = other RNA
accaggatccagagc

SEQ ID NO: 305-307 - skipped (3 entries)

SEQ ID NO: 308 - RNA, 10 nt, synthetic construct
  source 1..10: mol_type = other RNA
ccaggatcca

SEQ ID NO: 309 - RNA, 11 nt, synthetic construct
  source 1..11: mol_type = other RNA
ccaggatccag

SEQ ID NO: 310 - RNA, 12 nt, synthetic construct
  source 1..12: mol_type = other RNA
ccaggatccaga

SEQ ID NO: 311 - RNA, 13 nt, synthetic construct
  source 1..13: mol_type = other RNA
ccaggatccagag

SEQ ID NO: 312 - RNA, 14 nt, synthetic construct
  source 1..14: mol_type = other RNA
ccaggatccagagc

SEQ ID NO: 313 - RNA, 15 nt, synthetic construct
  source 1..15: mol_type = other RNA
ccaggatccagagct

SEQ ID NO: 314-316 - skipped (3 entries)

SEQ ID NO: 317 - RNA, 10 nt, synthetic construct
  source 1..10: mol_type = other RNA
tccagagctg

SEQ ID NO: 318 - RNA, 11 nt, synthetic construct
  source 1..11: mol_type = other RNA
tccagagctgc

SEQ ID NO: 319 - RNA, 12 nt, synthetic construct
  source 1..12: mol_type = other RNA
tccagagctgcc

SEQ ID NO: 320 - RNA, 13 nt, synthetic construct
  source 1..13: mol_type = other RNA
tccagagctgcca

SEQ ID NO: 321 - RNA, 14 nt, synthetic construct
  source 1..14: mol_type = other RNA
tccagagctgccaa

SEQ ID NO: 322 - RNA, 15 nt, synthetic construct
  source 1..15: mol_type = other RNA
tccagagctgccaag

SEQ ID NO: 323-325 - skipped (3 entries)

SEQ ID NO: 326 - RNA, 10 nt, synthetic construct
  source 1..10: mol_type = other RNA
ctgccaaggg

SEQ ID NO: 327 - RNA, 11 nt, synthetic construct
  source 1..11: mol_type = other RNA
ctgccaagggc

SEQ ID NO: 328 - RNA, 12 nt, synthetic construct
  source 1..12: mol_type = other RNA
ctgccaagggca

SEQ ID NO: 329 - RNA, 13 nt, synthetic construct
  source 1..13: mol_type = other RNA
ctgccaagggcag

SEQ ID NO: 330 - RNA, 14 nt, synthetic construct
  source 1..14: mol_type = other RNA
ctgccaagggcaga

SEQ ID NO: 331 - RNA, 15 nt, synthetic construct
  source 1..15: mol_type = other RNA
ctgccaagggcagag

SEQ ID NO: 332 - RNA, 20 nt, synthetic construct
  source 1..20: mol_type = other RNA
attgtgggactcatggccaa

SEQ ID NO: 333 - RNA, 20 nt, synthetic construct
  source 1..20: mol_type = other RNA
ccacgccattgtgggactca

SEQ ID NO: 334 - RNA, 20 nt, synthetic construct
  source 1..20: mol_type = other RNA
ggcacctcccacgccattgt

SEQ ID NO: 335 - RNA, 20 nt, synthetic construct
  source 1..20: mol_type = other RNA
tggcacctcccacgccattg

SEQ ID NO: 336 - RNA, 20 nt, synthetic construct
  source 1..20: mol_type = other RNA
agtgcccctcccaacttgtg

SEQ ID NO: 337 - RNA, 20 nt, synthetic construct
  source 1..20: mol_type = other RNA
tatggccccattgccctgtt

SEQ ID NO: 338 - RNA, 20 nt, synthetic construct
  source 1..20: mol_type = other RNA
gtatttggtttctcctcgta

SEQ ID NO: 339 - RNA, 20 nt, synthetic construct
  source 1..20: mol_type = other RNA
cagctctggatcctggtatt

SEQ ID NO: 340 - RNA, 20 nt, synthetic construct
  source 1..20: mol_type = other RNA
gcagctctggatcctggtat

SEQ ID NO: 341 - RNA, 20 nt, synthetic construct
  source 1..20: mol_type = other RNA
cccttggcagctctggatcc

SEQ ID NO: 342 - RNA, 20 nt, synthetic construct
  source 1..20: mol_type = other RNA
cactctgcccttggcagctc

SEQ ID NO: 343 - RNA, 20 nt, synthetic construct
  source 1..20: mol_type = other RNA
atgccactccactctgccct

SEQ ID NO: 344 - RNA, 20 nt, synthetic construct
  source 1..20: mol_type = other RNA
gcaggggtgggtaggcaggt

SEQ ID NO: 345 - RNA, 20 nt, synthetic construct
  source 1..20: mol_type = other RNA
tttggcaggggtgggtaggc

SEQ ID NO: 346 - RNA, 20 nt, synthetic construct
  source 1..20: mol_type = other RNA
ttgctttggcaggggtgggt

SEQ ID NO: 347 - RNA, 20 nt, synthetic construct
  source 1..20: mol_type = other RNA
cttcttgctttggcaggggt

SEQ ID NO: 348 - RNA, 20 nt, synthetic construct
  source 1..20: mol_type = other RNA
attggccatgagtcccacaa

SEQ ID NO: 349 - RNA, 20 nt, synthetic construct
  source 1..20: mol_type = other RNA
ccatgagtcccacaatggcg

SEQ ID NO: 350 - RNA, 20 nt, synthetic construct
  source 1..20: mol_type = other RNA
catgagtcccacaatggcgt

SEQ ID NO: 351 - RNA, 20 nt, synthetic construct
  source 1..20: mol_type = other RNA
gagtcccacaatggcgtggg

SEQ ID NO: 352 - RNA, 20 nt, synthetic construct
  source 1..20: mol_type = other RNA
gtgggaggtgccacacaagt

SEQ ID NO: 353 - RNA, 20 nt, synthetic construct
  source 1..20: mol_type = other RNA
tgggaggtgccacacaagtt

SEQ ID NO: 354 - RNA, 20 nt, synthetic construct
  source 1..20: mol_type = other RNA
gaggtgccacacaagttggg

SEQ ID NO: 355 - RNA, 20 nt, synthetic construct
  source 1..20: mol_type = other RNA
aggtgccacacaagttggga

SEQ ID NO: 356 - RNA, 20 nt, synthetic construct
  source 1..20: mol_type = other RNA
ggtgccacacaagttgggag

SEQ ID NO: 357 - RNA, 20 nt, synthetic construct
  source 1..20: mol_type = other RNA
gttgggaggggcactctcgt

SEQ ID NO: 358 - RNA, 20 nt, synthetic construct
  source 1..20: mol_type = other RNA
cgttggctatgactccaaac

SEQ ID NO: 359 - RNA, 20 nt, synthetic construct
  source 1..20: mol_type = other RNA
gttggctatgactccaaaca

SEQ ID NO: 360 - RNA, 20 nt, synthetic construct
  source 1..20: mol_type = other RNA
tatgactccaaacagggcaa

SEQ ID NO: 361 - RNA, 20 nt, synthetic construct
  source 1..20: mol_type = other RNA
atgactccaaacagggcaat

SEQ ID NO: 362 - RNA, 20 nt, synthetic construct
  source 1..20: mol_type = other RNA
tgactccaaacagggcaatg

SEQ ID NO: 363 - RNA, 20 nt, synthetic construct
  source 1..20: mol_type = other RNA
cagggcaatggggccatacg

SEQ ID NO: 364 - RNA, 20 nt, synthetic construct
  source 1..20: mol_type = other RNA
caaatacagctcccaatacc

SEQ ID NO: 365 - RNA, 20 nt, synthetic construct
  source 1..20: mol_type = other RNA
accaggatccagagctgcca

SEQ ID NO: 366 - RNA, 20 nt, synthetic construct
  source 1..20: mol_type = other RNA
ccaggatccagagctgccaa

SEQ ID NO: 367 - RNA, 20 nt, synthetic construct
  source 1..20: mol_type = other RNA
cagagctgccaagggcagag

SEQ ID NO: 368 - RNA, 20 nt, synthetic construct
  source 1..20: mol_type = other RNA
ctgccaagggcagagtggag

SEQ ID NO: 369 - RNA, 20 nt, synthetic construct
  source 1..20: mol_type = other RNA
agtggagtggcattcagagt

SEQ ID NO: 370 - RNA, 20 nt, synthetic construct
  source 1..20: mol_type = other RNA
cccctgccaaagcaagaaga

SEQ ID NO: 371 - RNA, 60 nt, synthetic construct
  source 1..60: mol_type = other RNA
gtcagggtcaggagccccccccctgaacccaggataaccctcaaagtcggggggcaaccc

SEQ ID NO: 372 - RNA, 60 nt, synthetic construct
  source 1..60: mol_type = other RNA
gtcagggtcaggagccccccccctgaacccaggaaaaccctcaaagtcggggggcaaccc

SEQ ID NO: 373 - RNA, 60 nt, synthetic construct
  source 1..60: mol_type = other RNA
gtcagggtcaggagccccccccctgcacccaggaaaaccctcaaagtcggggggcaaccc

SEQ ID NO: 374 - RNA, 51 nt, synthetic construct
  source 1..51: mol_type = other RNA
gggtcaggagccccccccctgaacccaggataaccctcaaagtcggggggc

SEQ ID NO: 375 - RNA, 51 nt, synthetic construct; identical to SEQ ID NO: 374
  source 1..51: mol_type = other RNA

SEQ ID NO: 376 - RNA, 13 nt, synthetic construct
  source 1..13: mol_type = other RNA
tggtggtggtggt

SEQ ID NO: 377 - RNA, 20 nt, synthetic construct
  source 1..20: mol_type = other RNA
gggacagggcagggacaggg

SEQ ID NO: 378 - RNA, 21 nt, synthetic construct
  source 1..21: mol_type = other RNA
gggtccgggtctgggtctggg

SEQ ID NO: 379 - RNA, 19 nt, synthetic construct
  source 1..19: mol_type = other RNA
gggcagggtctgggctggg

SEQ ID NO: 380 - RNA, 19 nt, synthetic construct
  source 1..19: mol_type = other RNA
gggctgggatgggaaaggg

SEQ ID NO: 381 - RNA, 19 nt, synthetic construct
  source 1..19: mol_type = other RNA
gggctctgggtgggccggg

SEQ ID NO: 382 - RNA, 18 nt, synthetic construct
  source 1..18: mol_type = other RNA
gggctgggctgggcaggg

SEQ ID NO: 383 - RNA, 17 nt, synthetic construct
  source 1..17: mol_type = other RNA
gggtgggctgggaaggg

SEQ ID NO: 384 - RNA, 17 nt, synthetic construct
  source 1..17: mol_type = other RNA
gggagggagggctaggg

SEQ ID NO: 385 - RNA, 17 nt, synthetic construct
  source 1..17: mol_type = other RNA
gggcagggctgggaggg

SEQ ID NO: 386 - RNA, 16 nt, synthetic construct
  source 1..16: mol_type = other RNA
gggtgggagggctggg

SEQ ID NO: 387 - RNA, 43 nt, synthetic construct
  source 1..43: mol_type = other RNA
gcgtaacctccatccgagttgcaagagagggaaacgcagtctc

SEQ ID NO: 388 - RNA, 160 nt, synthetic construct
  source 1..160: mol_type = other RNA
ggaattgcgggaaaggggtcaacagccgttcagtaccaagtctcaggggaaactttgagatggccttgcaaagggtatggtaataagctgacggacatggtcctaaccacgcagccaagtcctaagtcaacagatcttctgttgatatggatgcagttca

SEQ ID NO: 389 - RNA, 42 nt, synthetic construct
  source 1..42: mol_type = other RNA
ttgacgcggttctatctagttacgcgttaaaccaactagaaa

SEQ ID NO: 390 - RNA, 42 nt, synthetic construct
  source 1..42: mol_type = other RNA
ttgacgcggttctatctacttacgcgttaaaccaactagaaa

SEQ ID NO: 391 - RNA, 44 nt, synthetic construct
  source 1..44: mol_type = other RNA
cgcgagtctaggggataacgcgttaaacttcctagaaggcggtt

SEQ ID NO: 392 - RNA, 44 nt, synthetic construct
  source 1..44: mol_type = other RNA
cgcggatctagattgtaacgcgttaaaccatctagaaggcggtt

SEQ ID NO: 393 - RNA, 44 nt, synthetic construct
  source 1..44: mol_type = other RNA
cgcgtcgctaccgcccggcgcgttaaacacactagaaggcggtt

SEQ ID NO: 394 - RNA, 37 nt, synthetic construct
  source 1..37: mol_type = other RNA
cgcggttctatctagttacgcgttaaaccaactagaa

SEQ ID NO: 395 - RNA, 68 nt, synthetic construct
  source 1..68: mol_type = other RNA
ggccggcatggtcccagcctcctcgctggcgccggctgggcaacatgcttcggcatggcgaatgggac

SEQ ID NO: 396 - RNA, 18 nt, synthetic construct
  source 1..18: mol_type = other RNA
ggtgggagacgtcccacc

SEQ ID NO: 397 - RNA, 16 nt, synthetic construct
  source 1..16: mol_type = other RNA
tgggagacgtcccacc

SEQ ID NO: 398 - RNA, 24 nt, synthetic construct
  source 1..24: mol_type = other RNA
gagcagcatggcgtcgctgctcac

SEQ ID NO: 399 - RNA, 21 nt, synthetic construct
  source 1..21: mol_type = other RNA
ccatcagttgacaccctgagg

SEQ ID NO: 400 - RNA, 28 nt, synthetic construct
  source 1..28: mol_type = other RNA
gcagacctaagtggtgacatatggtctg

SEQ ID NO: 401 - RNA, 24 nt, synthetic construct
  source 1..24: mol_type = other RNA
catgcgattagaaataatcgcatg

SEQ ID NO: 402 - RNA, 20 nt, synthetic construct
  source 1..20: mol_type = other RNA
atggccccattgcactgttt

SEQ ID NO: 403 - RNA, 76 nt, synthetic construct
  source 1..76: mol_type = other RNA
gttttagagctatacgtagcaagttaaaataaggctagtccgttatcaactttacgaagtggcaccgagtcggtgc

SEQ ID NO: 404 - RNA, 88 nt, synthetic construct
  source 1..88: mol_type = other RNA
gttttagagctagctcatgaaaatgagctagcaagttaaaataaggctagtccgttatcaacttgaaaaagtgggaccgagtcggtcc

SEQ ID NO: 405 - RNA, 76 nt, synthetic construct
  source 1..76: mol_type = other RNA
gtttaagagctagaaatagcaagtttaaataaggctagtccgttatcaacttgaaaaagtggcaccgagtcggtgc

SEQ ID NO: 406 - RNA, 86 nt, synthetic construct
  source 1..86: mol_type = other RNA
gttttagagctatgctggaaacagcatagcaagttaaaataaggctagtccgttatcaacttgaaaaagtggcaccgagtcggtgc

SEQ ID NO: 407 - RNA, 24 nt, synthetic construct
  source 1..24: mol_type = other RNA
tcgtatggccccattgccctgttt

SEQ ID NO: 408 - RNA, 27 nt, synthetic construct
  source 1..27: mol_type = other RNA
tcctcgtatggccccattgccctgttt

SEQ ID NO: 409 - RNA, 29 nt, synthetic construct
  source 1..29: mol_type = other RNA
tctcctcgtatggccccattgccctgttt

SEQ ID NO: 410 - RNA, 30 nt, synthetic construct
  source 1..30: mol_type = other RNA
ttctcctcgtatggccccattgccctgttt

SEQ ID NO: 411 - RNA, 31 nt, synthetic construct
  source 1..31: mol_type = other RNA
tttctcctcgtatggccccattgccctgttt

SEQ ID NO: 412 - RNA, 32 nt, synthetic construct
  source 1..32: mol_type = other RNA
gtttctcctcgtatggccccattgccctgttt

SEQ ID NO: 413 - RNA, 33 nt, synthetic construct
  source 1..33: mol_type = other RNA
ggtttctcctcgtatggccccattgccctgttt

SEQ ID NO: 414 - RNA, 34 nt, synthetic construct
  source 1..34: mol_type = other RNA
tggtttctcctcgtatggccccattgccctgttt

SEQ ID NO: 415 - RNA, 35 nt, synthetic construct
  source 1..35: mol_type = other RNA
ttggtttctcctcgtatggccccattgccctgttt

SEQ ID NO: 416 - RNA, 36 nt, synthetic construct
  source 1..36: mol_type = other RNA
tttggtttctcctcgtatggccccattgccctgttt

SEQ ID NO: 417 - RNA, 37 nt, synthetic construct
  source 1..37: mol_type = other RNA
atttggtttctcctcgtatggccccattgccctgttt

SEQ ID NO: 418 - RNA, 25 nt, synthetic construct
  source 1..25: mol_type = other RNA
gccctgtttggagtcatagccaacg

SEQ ID NO: 419 - RNA, 26 nt, synthetic construct
  source 1..26: mol_type = other RNA
tgccctgtttggagtcatagccaacg

SEQ ID NO: 420 - RNA, 27 nt, synthetic construct
  source 1..27: mol_type = other RNA
ttgccctgtttggagtcatagccaacg

SEQ ID NO: 421 - RNA, 28 nt, synthetic construct
  source 1..28: mol_type = other RNA
attgccctgtttggagtcatagccaacg

SEQ ID NO: 422 - RNA, 33 nt, synthetic construct
  source 1..33: mol_type = other RNA
gccccattgccctgtttggagtcatagccaacg

SEQ ID NO: 423 - RNA, 34 nt, synthetic construct
  source 1..34: mol_type = other RNA
ggccccattgccctgtttggagtcatagccaacg

SEQ ID NO: 424 - RNA, 35 nt, synthetic construct
  source 1..35: mol_type = other RNA
tggccccattgccctgtttggagtcatagccaacg

SEQ ID NO: 425 - RNA, 36 nt, synthetic construct
  source 1..36: mol_type = other RNA
atggccccattgccctgtttggagtcatagccaacg

SEQ ID NO: 426 - RNA, 37 nt, synthetic construct
  source 1..37: mol_type = other RNA
tatggccccattgccctgtttggagtcatagccaacg

SEQ ID NO: 427 - RNA, 37 nt, synthetic construct
  source 1..37: mol_type = other RNA
gccctgtttggagtcatagccaacgagagtgcccctc

SEQ ID NO: 428 - RNA, 11 nt, synthetic construct
  source 1..11: mol_type = other RNA
actccaaacag

SEQ ID NO: 429 - RNA, 12 nt, synthetic construct
  source 1..12: mol_type = other RNA
gactccaaacag

SEQ ID NO: 430 - RNA, 13 nt, synthetic construct
  source 1..13: mol_type = other RNA
tgactccaaacag

SEQ ID NO: 431 - RNA, 14 nt, synthetic construct
  source 1..14: mol_type = other RNA
atgactccaaacag

SEQ ID NO: 432 - RNA, 15 nt, synthetic construct
  source 1..15: mol_type = other RNA
tatgactccaaacag

SEQ ID NO: 433 - RNA, 17 nt, synthetic construct
  source 1..17: mol_type = other RNA
gctatgactccaaacag

SEQ ID NO: 434 - RNA, 18 nt, synthetic construct
  source 1..18: mol_type = other RNA
ggctatgactccaaacag

SEQ ID NO: 435 - RNA, 19 nt, synthetic construct
  source 1..19: mol_type = other RNA
tggctatgactccaaacag

SEQ ID NO: 436 - RNA, 20 nt, synthetic construct
  source 1..20: mol_type = other RNA
ttggctatgactccaaacag

SEQ ID NO: 437 - RNA, 21 nt, synthetic construct
  source 1..21: mol_type = other RNA
gttggctatgactccaaacag

SEQ ID NO: 438 - RNA, 23 nt, synthetic construct
  source 1..23: mol_type = other RNA
tcgttggctatgactccaaacag

SEQ ID NO: 439 - RNA, 25 nt, synthetic construct
  source 1..25: mol_type = other RNA
tctcgttggctatgactccaaacag

SEQ ID NO: 440 - RNA, 27 nt, synthetic construct
  source 1..27: mol_type = other RNA
actctcgttggctatgactccaaacag

SEQ ID NO: 441 - RNA, 29 nt, synthetic construct
  source 1..29: mol_type = other RNA
gcactctcgttggctatgactccaaacag

SEQ ID NO: 442 - RNA, 30 nt, synthetic construct
  source 1..30: mol_type = other RNA
ggcactctcgttggctatgactccaaacag

SEQ ID NO: 443 - RNA, 31 nt, synthetic construct
  source 1..31: mol_type = other RNA
gggcactctcgttggctatgactccaaacag

SEQ ID NO: 444 - RNA, 32 nt, synthetic construct
  source 1..32: mol_type = other RNA
ggggcactctcgttggctatgactccaaacag

SEQ ID NO: 445 - RNA, 33 nt, synthetic construct
  source 1..33: mol_type = other RNA
aggggcactctcgttggctatgactccaaacag

SEQ ID NO: 446 - RNA, 34 nt, synthetic construct
  source 1..34: mol_type = other RNA
gaggggcactctcgttggctatgactccaaacag

SEQ ID NO: 447 - RNA, 35 nt, synthetic construct
  source 1..35: mol_type = other RNA
ggaggggcactctcgttggctatgactccaaacag

SEQ ID NO: 448 - RNA, 36 nt, synthetic construct
  source 1..36: mol_type = other RNA
gggaggggcactctcgttggctatgactccaaacag

SEQ ID NO: 449 - RNA, 37 nt, synthetic construct
  source 1..37: mol_type = other RNA
tgggaggggcactctcgttggctatgactccaaacag

SEQ ID NO: 450 - RNA, 20 nt, synthetic construct
  source 1..20: mol_type = other RNA
acagggcaatggggccatac

SEQ ID NO: 451 - RNA, 21 nt, synthetic construct
  source 1..21: mol_type = other RNA
aacagggcaatggggccatac

SEQ ID NO: 452 - RNA, 22 nt, synthetic construct
  source 1..22: mol_type = other RNA
aaacagggcaatggggccatac

SEQ ID NO: 453 - RNA, 25 nt, synthetic construct
  source 1..25: mol_type = other RNA
tccaaacagggcaatggggccatac

SEQ ID NO: 454 - RNA, 27 nt, synthetic construct
  source 1..27: mol_type = other RNA
actccaaacagggcaatggggccatac

SEQ ID NO: 455 - RNA, 28 nt, synthetic construct
  source 1..28: mol_type = other RNA
gactccaaacagggcaatggggccatac

SEQ ID NO: 456 - RNA, 29 nt, synthetic construct
  source 1..29: mol_type = other RNA
tgactccaaacagggcaatggggccatac

SEQ ID NO: 457 - RNA, 30 nt, synthetic construct
  source 1..30: mol_type = other RNA
atgactccaaacagggcaatggggccatac

SEQ ID NO: 458 - RNA, 31 nt, synthetic construct
  source 1..31: mol_type = other RNA
tatgactccaaacagggcaatggggccatac

SEQ ID NO: 459 - RNA, 33 nt, synthetic construct
  source 1..33: mol_type = other RNA
gctatgactccaaacagggcaatggggccatac

SEQ ID NO: 460 - RNA, 34 nt, synthetic construct
  source 1..34: mol_type = other RNA
ggctatgactccaaacagggcaatggggccatac

SEQ ID NO: 461 - RNA, 35 nt, synthetic construct
  source 1..35: mol_type = other RNA
tggctatgactccaaacagggcaatggggccatac

SEQ ID NO: 462 - RNA, 36 nt, synthetic construct
  source 1..36: mol_type = other RNA
ttggctatgactccaaacagggcaatggggccatac

SEQ ID NO: 463 - RNA, 37 nt, synthetic construct
  source 1..37: mol_type = other RNA
gttggctatgactccaaacagggcaatggggccatac

SEQ ID NO: 464 - RNA, 35 nt, synthetic construct
  source 1..35: mol_type = other RNA
acagggcaatggggccatacgaggagaaaccaaat

SEQ ID NO: 465 - RNA, 36 nt, synthetic construct
  source 1..36: mol_type = other RNA
aacagggcaatggggccatacgaggagaaaccaaat

SEQ ID NO: 466 - RNA, 37 nt, synthetic construct
  source 1..37: mol_type = other RNA
aaacagggcaatggggccatacgaggagaaaccaaat

SEQ ID NO: 467-469 - skipped (3 entries)

SEQ ID NO: 470 - RNA, 10 nt, synthetic construct
  source 1..10: mol_type = other RNA
ggagtcatag

SEQ ID NO: 471 - RNA, 11 nt, synthetic construct
  source 1..11: mol_type = other RNA
ggagtcatagc

SEQ ID NO: 472 - RNA, 12 nt, synthetic construct
  source 1..12: mol_type = other RNA
ggagtcatagcc

SEQ ID NO: 473 - RNA, 13 nt, synthetic construct
  source 1..13: mol_type = other RNA
ggagtcatagcca

SEQ ID NO: 474 - RNA, 14 nt, synthetic construct
  source 1..14: mol_type = other RNA
ggagtcatagccaa

SEQ ID NO: 475 - RNA, 15 nt, synthetic construct
  source 1..15: mol_type = other RNA
ggagtcatagccaac

SEQ ID NO: 476-478 - skipped (3 entries)

SEQ ID NO: 479 - RNA, 10 nt, synthetic construct
  source 1..10: mol_type = other RNA
agagtgcccc

SEQ ID NO: 480 - RNA, 11 nt, synthetic construct
  source 1..11: mol_type = other RNA
agagtgcccct

SEQ ID NO: 481 - RNA, 12 nt, synthetic construct
  source 1..12: mol_type = other RNA
agagtgcccctc

SEQ ID NO: 482 - RNA, 13 nt, synthetic construct
  source 1..13: mol_type = other RNA
agagtgcccctcc

SEQ ID NO: 483 - RNA, 14 nt, synthetic construct
  source 1..14: mol_type = other RNA
agagtgcccctccc

SEQ ID NO: 484 - RNA, 15 nt, synthetic construct
  source 1..15: mol_type = other RNA
agagtgcccctccca

SEQ ID NO: 485-487 - skipped (3 entries)

SEQ ID NO: 488 - RNA, 10 nt, synthetic construct
  source 1..10: mol_type = other RNA
ccaacttgtg

SEQ ID NO: 489 - RNA, 11 nt, synthetic construct
  source 1..11: mol_type = other RNA
ccaacttgtgt

SEQ ID NO: 490 - RNA, 12 nt, synthetic construct
  source 1..12: mol_type = other RNA
ccaacttgtgtg

SEQ ID NO: 491 - RNA, 13 nt, synthetic construct
  source 1..13: mol_type = other RNA
ccaacttgtgtgg

SEQ ID NO: 492 - RNA, 14 nt, synthetic construct
  source 1..14: mol_type = other RNA
ccaacttgtgtggc

SEQ ID NO: 493 - RNA, 15 nt, synthetic construct
  source 1..15: mol_type = other RNA
ccaacttgtgtggca

SEQ ID NO: 494-496 - skipped (3 entries)

SEQ ID NO: 497 - RNA, 10 nt, synthetic construct
  source 1..10: mol_type = other RNA
ggcaatgggg

SEQ ID NO: 498 - RNA, 11 nt, synthetic construct
  source 1..11: mol_type = other RNA
ggcaatggggc

SEQ ID NO: 499 - RNA, 12 nt, synthetic construct
  source 1..12: mol_type = other RNA
ggcaatggggcc

SEQ ID NO: 500 - RNA, 13 nt, synthetic construct
  source 1..13: mol_type = other RNA
ggcaatggggcca

SEQ ID NO: 501 - RNA, 14 nt, synthetic construct
  source 1..14: mol_type = other RNA
ggcaatggggccat

SEQ ID NO: 502 - RNA, 15 nt, synthetic construct
  source 1..15: mol_type = other RNA
ggcaatggggccata

SEQ ID NO: 503-505 - skipped (3 entries)

SEQ ID NO: 506 - RNA, 10 nt, synthetic construct
  source 1..10: mol_type = other RNA
gaggagaaac

SEQ ID NO: 507 - RNA, 11 nt, synthetic construct
  source 1..11: mol_type = other RNA
gaggagaaacc

SEQ ID NO: 508 - RNA, 12 nt, synthetic construct
  source 1..12: mol_type = other RNA
gaggagaaacca

SEQ ID NO: 509 - RNA, 13 nt, synthetic construct
  source 1..13: mol_type = other RNA
gaggagaaaccaa

SEQ ID NO: 510 - RNA, 14 nt, synthetic construct
  source 1..14: mol_type = other RNA
gaggagaaaccaaa

SEQ ID NO: 511 - RNA, 15 nt, synthetic construct
  source 1..15: mol_type = other RNA
gaggagaaaccaaat

SEQ ID NO: 512-514 - skipped (3 entries)

SEQ ID NO: 515 - RNA, 10 nt, synthetic construct
  source 1..10: mol_type = other RNA
acagctccca

SEQ ID NO: 516 - RNA, 11 nt, synthetic construct
  source 1..11: mol_type = other RNA
acagctcccaa

SEQ ID NO: 517 - RNA, 12 nt, synthetic construct
  source 1..12: mol_type = other RNA
acagctcccaat

SEQ ID NO: 518 - RNA, 13 nt, synthetic construct
  source 1..13: mol_type = other RNA
acagctcccaata

SEQ ID NO: 519 - RNA, 14 nt, synthetic construct
  source 1..14: mol_type = other RNA
acagctcccaatac

SEQ ID NO: 520 - RNA, 15 nt, synthetic construct
  source 1..15: mol_type = other RNA
acagctcccaatacc

SEQ ID NO: 521 - RNA, 20 nt, synthetic construct
  source 1..20: mol_type = other RNA
attgtgggactcatggccaa

SEQ ID NO: 522 - RNA, 20 nt, synthetic construct
  source 1..20: mol_type = other RNA
ccacgccattgtgggactca

SEQ ID NO: 523 - RNA, 20 nt, synthetic construct
  source 1..20: mol_type = other RNA
ggcacctcccacgccattgt

SEQ ID NO: 524 - RNA, 20 nt, synthetic construct
  source 1..20: mol_type = other RNA
tggcacctcccacgccattg

SEQ ID NO: 525 - RNA, 20 nt, synthetic construct
  source 1..20: mol_type = other RNA
agtgcccctcccaacttgtg

SEQ ID NO: 526 - RNA, 20 nt, synthetic construct
  source 1..20: mol_type = other RNA
tatggccccattgccctgtt

SEQ ID NO: 527 - RNA, 20 nt, synthetic construct
  source 1..20: mol_type = other RNA
gtatttggtttctcctcgta

SEQ ID NO: 528 - RNA, 20 nt, synthetic construct
  source 1..20: mol_type = other RNA
ctggtattgggagctgtatt

SEQ ID NO: 529 - RNA, 20 nt, synthetic construct
  source 1..20: mol_type = other RNA
cagctctggatcctggtatt

SEQ ID NO: 530 - RNA, 20 nt, synthetic construct
  source 1..20: mol_type = other RNA
gcagctctggatcctggtat

SEQ ID NO: 531 - RNA, 20 nt, synthetic construct
  source 1..20: mol_type = other RNA
cccttggcagctctggatcc

SEQ ID NO: 532 - RNA, 20 nt, synthetic construct
  source 1..20: mol_type = other RNA
cactctgcccttggcagctc

SEQ ID NO: 533 - RNA, 20 nt, synthetic construct
  source 1..20: mol_type = other RNA
atgccactccactctgccct

SEQ ID NO: 534 - RNA, 20 nt, synthetic construct
  source 1..20: mol_type = other RNA
tagaagttaacacttaccat

SEQ ID NO: 535 - RNA, 20 nt, synthetic construct
  source 1..20: mol_type = other RNA
attggccatgagtcccacaa

SEQ ID NO: 536 - RNA, 20 nt, synthetic construct
  source 1..20: mol_type = other RNA
ccatgagtcccacaatggcg

SEQ ID NO: 537 - RNA, 20 nt, synthetic construct
  source 1..20: mol_type = other RNA
catgagtcccacaatggcgt

SEQ ID NO: 538 - RNA, 20 nt, synthetic construct
  source 1..20: mol_type = other RNA
gagtcccacaatggcgtggg

SEQ ID NO: 539 - RNA, 20 nt, synthetic construct
  source 1..20: mol_type = other RNA
gtgggaggtgccacacaagt

SEQ ID NO: 540 - RNA, 20 nt, synthetic construct
  source 1..20: mol_type = other RNA
tgggaggtgccacacaagtt

SEQ ID NO: 541 - RNA, 20 nt, synthetic construct
  source 1..20: mol_type = other RNA
gaggtgccacacaagttggg

SEQ ID NO: 542 - RNA, 20 nt, synthetic construct
  source 1..20: mol_type = other RNA
aggtgccacacaagttggga

SEQ ID NO: 543 - RNA, 20 nt, synthetic construct
  source 1..20: mol_type = other RNA
ggtgccacacaagttgggag

SEQ ID NO: 544 - RNA, 20 nt, synthetic construct
  source 1..20: mol_type = other RNA
gttgggaggggcactctcgt

SEQ ID NO: 545 - RNA, 20 nt, synthetic construct
  source 1..20: mol_type = other RNA
gttggctatgactccaaaca

SEQ ID NO: 546 - RNA, 20 nt, synthetic construct
  source 1..20: mol_type = other RNA
tatgactccaaacagggcaa

SEQ ID NO: 547 - RNA, 20 nt, synthetic construct
  source 1..20: mol_type = other RNA
atgactccaaacagggcaat

SEQ ID NO: 548 - RNA, 20 nt, synthetic construct
  source 1..20: mol_type = other RNA
tgactccaaacagggcaatg

SEQ ID NO: 549 - RNA, 20 nt, synthetic construct
  source 1..20: mol_type = other RNA
cagggcaatggggccatacg

SEQ ID NO: 550 - RNA, 20 nt, synthetic construct
  source 1..20: mol_type = other RNA
caaatacagctcccaatacc

SEQ ID NO: 551 - RNA, 20 nt, synthetic construct
  source 1..20: mol_type = other RNA
accaggatccagagctgcca

SEQ ID NO: 552 - RNA, 20 nt, synthetic construct
  source 1..20: mol_type = other RNA
ccaggatccagagctgccaa

SEQ ID NO: 553 - RNA, 20 nt, synthetic construct
  source 1..20: mol_type = other RNA
cagagctgccaagggcagag

SEQ ID NO: 554 - RNA, 20 nt, synthetic construct
  source 1..20: mol_type = other RNA
ctgccaagggcagagtggag

SEQ ID NO: 555 - RNA, 20 nt, synthetic construct
  source 1..20: mol_type = other RNA
agtggagtggcattcagagt

SEQ ID NO: 556-3000 - skipped (2445 entries)

SEQ ID NO: 3001 - RNA, 37 nt, synthetic construct; identical to SEQ ID NO: 168
  source 1..37: mol_type = other RNA

SEQ ID NO: 3002 - RNA, 23 nt, synthetic construct
  source 1..23: mol_type = other RNA
gaaaccaaatacagctccgagta

SEQ ID NO: 3003 - RNA, 20 nt, synthetic construct
  source 1..20: mol_type = other RNA
tgtatttggtttctcatcgt

SEQ ID NO: 3004 - RNA, 30 nt, synthetic construct
  source 1..30: mol_type = other RNA
tgtatttggtttctcctcgtatgggcccat

SEQ ID NO: 3005 - RNA, 35 nt, synthetic construct
  source 1..35: mol_type = other RNA
ggagctgtatttggtttctcctcgtatggacccat

SEQ ID NO: 3006 - RNA, 25 nt, synthetic construct
  source 1..25: mol_type = other RNA
gagaaaccaaatacagctcctaata

SEQ ID NO: 3007 - RNA, 25 nt, synthetic construct
  source 1..25: mol_type = other RNA
gagaaaccaaatacagctccgagta

SEQ ID NO: 3008 - RNA, 25 nt, synthetic construct
  source 1..25: mol_type = other RNA
gagaaaccaaatacagctccaagta

SEQ ID NO: 3009 - RNA, 27 nt, synthetic construct
  source 1..27: mol_type = other RNA
aggagaaaccaaatacagctcctaata

SEQ ID NO: 3010 - RNA, 27 nt, synthetic construct
  source 1..27: mol_type = other RNA
aggagaaaccaaatacagctccgagta

SEQ ID NO: 3011 - RNA, 27 nt, synthetic construct
  source 1..27: mol_type = other RNA
aggagaaaccaaatacagctccaagta

SEQ ID NO: 3012 - RNA, 18 nt, synthetic construct
  source 1..18: mol_type = other RNA
tatttggtttctcgtcgt

SEQ ID NO: 3013 - RNA, 18 nt, synthetic construct
  source 1..18: mol_type = other RNA
tatttggtttctcatcgt

SEQ ID NO: 3014 - RNA, 18 nt, synthetic construct
  source 1..18: mol_type = other RNA
tatttggtttctcttcgt

SEQ ID NO: 3015 - skipped

SEQ ID NO: 3016 - RNA, 19 nt, synthetic construct
  source 1..19: mol_type = other RNA
gtatttggtttctcgtcgt

SEQ ID NO: 3017 - RNA, 19 nt, synthetic construct
  source 1..19: mol_type = other RNA
gtatttggtttctcatcgt

SEQ ID NO: 3018 - RNA, 20 nt, synthetic construct
  source 1..20: mol_type = other RNA
tgtatttggtttctcttcgt

SEQ ID NO: 3019 - RNA, 20 nt, synthetic construct
  source 1..20: mol_type = other RNA
tgtatttggtttctcgtcgt

SEQ ID NO: 3020 - RNA, 20 nt, synthetic construct
  source 1..20: mol_type = other RNA
tgtatttggtttctcatcgt

SEQ ID NO: 3021 - RNA, 21 nt, synthetic construct
  source 1..21: mol_type = other RNA
ctgtatttggtttctcttcgt

SEQ ID NO: 3022 - RNA, 21 nt, synthetic construct
  source 1..21: mol_type = other RNA
ctgtatttggtttctcgtcgt

SEQ ID NO: 3023 - RNA, 21 nt, synthetic construct
  source 1..21: mol_type = other RNA
ctgtatttggtttctcctcgt

SEQ ID NO: 3024 - RNA, 21 nt, synthetic construct
  source 1..21: mol_type = other RNA
ctgtatttggtttctcatcgt

SEQ ID NO: 3025 - RNA, 22 nt, synthetic construct
  source 1..22: mol_type = other RNA
gctgtatttggtttctcttcgt

SEQ ID NO: 3026 - RNA, 22 nt, synthetic construct
  source 1..22: mol_type = other RNA
gctgtatttggtttctcgtcgt

SEQ ID NO: 3027 - RNA, 22 nt, synthetic construct
  source 1..22: mol_type = other RNA
gctgtatttggtttctcatcgt

SEQ ID NO: 3028 - RNA, 23 nt, synthetic construct
  source 1..23: mol_type = other RNA
agctgtatttggtttctcttcgt

SEQ ID NO: 3029 - RNA, 23 nt, synthetic construct
  source 1..23: mol_type = other RNA
agctgtatttggtttctcgtcgt

SEQ ID NO: 3030 - RNA, 23 nt, synthetic construct
  source 1..23: mol_type = other RNA
agctgtatttggtttctcatcgt

SEQ ID NO: 3031-3034 - skipped (4 entries)

SEQ ID NO: 3035 - RNA, 28 nt, synthetic construct
  source 1..28: mol_type = other RNA
tatttggtttctcctcgtatggtcccat

SEQ ID NO: 3036 - RNA, 28 nt, synthetic construct
  source 1..28: mol_type = other RNA
tatttggtttctcctcgtatgggcccat

SEQ ID NO: 3037 - RNA, 28 nt, synthetic construct
  source 1..28: mol_type = other RNA
tatttggtttctcctcgtatggccccat

SEQ ID NO: 3038 - RNA, 28 nt, synthetic construct
  source 1..28: mol_type = other RNA
tatttggtttctcctcgtatggacccat

SEQ ID NO: 3039 - RNA, 29 nt, synthetic construct
  source 1..29: mol_type = other RNA
gtatttggtttctcctcgtatggtcccat

SEQ ID NO: 3040 - RNA, 29 nt, synthetic construct
  source 1..29: mol_type = other RNA
gtatttggtttctcctcgtatgggcccat

SEQ ID NO: 3041 - RNA, 29 nt, synthetic construct
  source 1..29: mol_type = other RNA
gtatttggtttctcctcgtatggccccat

SEQ ID NO: 3042 - RNA, 29 nt, synthetic construct
  source 1..29: mol_type = other RNA
gtatttggtttctcctcgtatggacccat

SEQ ID NO: 3043 - RNA, 30 nt, synthetic construct
  source 1..30: mol_type = other RNA
tgtatttggtttctcctcgtatggtcccat

SEQ ID NO: 3044 - RNA, 30 nt, synthetic construct; identical to SEQ ID NO: 3004
  source 1..30: mol_type = other RNA

SEQ ID NO: 3045 - RNA, 30 nt, synthetic construct; identical to SEQ ID NO: 133
  source 1..30: mol_type = other RNA

SEQ ID NO: 3046 - RNA, 30 nt, synthetic construct
  source 1..30: mol_type = other RNA
tgtatttggtttctcctcgtatggacccat

SEQ ID NO: 3047 - RNA, 31 nt, synthetic construct
  source 1..31: mol_type = other RNA
ctgtatttggtttctcctcgtatggtcccat

SEQ ID NO: 3048 - RNA, 31 nt, synthetic construct
  source 1..31: mol_type = other RNA
ctgtatttggtttctcctcgtatgggcccat

SEQ ID NO: 3049 - RNA, 31 nt, synthetic construct
  source 1..31: mol_type = other RNA
ctgtatttggtttctcctcgtatggccccat

SEQ ID NO: 3050 - RNA, 31 nt, synthetic construct
  source 1..31: mol_type = other RNA
ctgtatttggtttctcctcgtatggacccat

SEQ ID NO: 3051 - RNA, 31 nt, synthetic construct; identical to SEQ ID NO: 3049
  source 1..31: mol_type = other RNA

SEQ ID NO: 3052 - RNA, 32 nt, synthetic construct
  source 1..32: mol_type = other RNA
gctgtatttggtttctcctcgtatggtcccat

SEQ ID NO: 3053 - RNA, 32 nt, synthetic construct
  source 1..32: mol_type = other RNA
gctgtatttggtttctcctcgtatgggcccat

SEQ ID NO: 3054 - RNA, 32 nt, synthetic construct; identical to SEQ ID NO: 134
  source 1..32: mol_type = other RNA

SEQ ID NO: 3055 - RNA, 32 nt, synthetic construct
  source 1..32: mol_type = other RNA
gctgtatttggtttctcctcgtatggacccat

SEQ ID NO: 3056 - RNA, 33 nt, synthetic construct; identical to SEQ ID NO: 135
  source 1..33: mol_type = other RNA

SEQ ID NO: 3057 - RNA, 33 nt, synthetic construct; identical to SEQ ID NO: 136
  source 1..33: mol_type = other RNA

SEQ ID NO: 3058 - RNA, 33 nt, synthetic construct; identical to SEQ ID NO: 137
  source 1..33: mol_type = other RNA

SEQ ID NO: 3059 - RNA, 33 nt, synthetic construct; identical to SEQ ID NO: 138
  source 1..33: mol_type = other RNA

SEQ ID NO: 3060 - RNA, 34 nt, synthetic construct
  source 1..34: mol_type = other RNA
gagctgtatttggtttctcctcgtatggtcccat

SEQ ID NO: 3061 - RNA, 34 nt, synthetic construct
  source 1..34: mol_type = other RNA
gagctgtatttggtttctcctcgtatgggcccat

SEQ ID NO: 3062 - RNA, 34 nt, synthetic construct; identical to SEQ ID NO: 139
  source 1..34: mol_type = other RNA

SEQ ID NO: 3063 - RNA, 34 nt, synthetic construct
  source 1..34: mol_type = other RNA
gagctgtatttggtttctcctcgtatggacccat

SEQ ID NO: 3064 - RNA, 35 nt, synthetic construct
  source 1..35: mol_type = other RNA
ggagctgtatttggtttctcctcgtatggtcccat

SEQ ID NO: 3065 - RNA, 35 nt, synthetic construct
  source 1..35: mol_type = other RNA
ggagctgtatttggtttctcctcgtatgggcccat

SEQ ID NO: 3066 - RNA, 35 nt, synthetic construct; identical to SEQ ID NO: 140
  source 1..35: mol_type = other RNA

SEQ ID NO: 3067 - RNA, 35 nt, synthetic construct; identical to SEQ ID NO: 3005
  source 1..35: mol_type = other RNA

SEQ ID NO: 3068 - RNA, 36 nt, synthetic construct; identical to SEQ ID NO: 141
  source 1..36: mol_type = other RNA

SEQ ID NO: 3069 - RNA, 36 nt, synthetic construct; identical to SEQ ID NO: 142
  source 1..36: mol_type = other RNA

SEQ ID NO: 3070 - RNA, 36 nt, synthetic construct; identical to SEQ ID NO: 143
  source 1..36: mol_type = other RNA

SEQ ID NO: 3071 - RNA, 36 nt, synthetic construct; identical to SEQ ID NO: 144
  source 1..36: mol_type = other RNA

SEQ ID NO: 3072-3100 - skipped (29 entries)

SEQ ID NO: 3101 - RNA, 21 nt, synthetic construct
  source 1..21: mol_type = other RNA
ctgtatttggtttctcctcgt

SEQ ID NO: 3102-3200 - skipped (99 entries)

SEQ ID NO: 3201 - RNA, 20 nt, synthetic construct
  source 1..20: mol_type = other RNA
tatggccccattgctctgtt

SEQ ID NO: 3202 - RNA, 20 nt, synthetic construct
  source 1..20: mol_type = other RNA
tatggccccattgcactgtt

SEQ ID NO: 3203 - RNA, 20 nt, synthetic construct
  source 1..20: mol_type = other RNA
tatggccccattgcgctgtt

SEQ ID NO: 3204 - RNA, 20 nt, synthetic construct
  source 1..20: mol_type = other RNA
accaagccttcttcttgctt

SEQ ID NO: 3205 - RNA, 20 nt, synthetic construct
  source 1..20: mol_type = other RNA
agccttcttcttgctttggc

SEQ ID NO: 3206 - RNA, 20 nt, synthetic construct
  source 1..20: mol_type = other RNA
gccttcttcttgctttggca

SEQ ID NO: 3207 - RNA, 20 nt, synthetic construct
  source 1..20: mol_type = other RNA
ccttcttcttgctttggcag

SEQ ID NO: 3208 - RNA, 20 nt, synthetic construct
  source 1..20: mol_type = other RNA
tcttcttgctttggcagggg

SEQ ID NO: 3209 - RNA, 20 nt, synthetic construct
  source 1..20: mol_type = other RNA
gcaggggtgggtaggcaggt

SEQ ID NO: 3210 - RNA, 20 nt, synthetic construct
  source 1..20: mol_type = other RNA
tttggcaggggtgggtaggc

SEQ ID NO: 3211 - RNA, 20 nt, synthetic construct
  source 1..20: mol_type = other RNA
cgttggctatgactccaaac

SEQ ID NO: 3212 - RNA, 20 nt, synthetic construct
  source 1..20: mol_type = other RNA
gtatttggtttctcatcgta

SEQ ID NO: 3213 - RNA, 20 nt, synthetic construct
  source 1..20: mol_type = other RNA
gtatttggtttctcgtcgta

SEQ ID NO: 3214 - RNA, 20 nt, synthetic construct
  source 1..20: mol_type = other RNA
gtatttggtttctcttcgta

SEQ ID NO: 3215 - RNA, 20 nt, synthetic construct
  source 1..20: mol_type = other RNA
cccctgccaaagcaagaaga

SEQ ID NO: 3216 - RNA, 20 nt, synthetic construct
  source 1..20: mol_type = other RNA
ttgctttggcaggggtgggt

SEQ ID NO: 3217-5000 - skipped (1784 entries)

SEQ ID NO: 5001 - RNA, 20 nt, synthetic construct
  source 1..20: mol_type = other RNA
gtatttggtttctcatcgta

SEQ ID NO: 5002 - RNA, 20 nt, synthetic construct
  source 1..20: mol_type = other RNA
gtatttggtttctcgtcgta

SEQ ID NO: 5003 - RNA, 20 nt, synthetic construct
  source 1..20: mol_type = other RNA
gtatttggtttctcttcgta

SEQ ID NO: 5004 - RNA, 20 nt, synthetic construct
  source 1..20: mol_type = other RNA
tatggtcccattgccctgtt

SEQ ID NO: 5005 - RNA, 20 nt, synthetic construct
  source 1..20: mol_type = other RNA
tatgggcccattgccctgtt

SEQ ID NO: 5006 - RNA, 20 nt, synthetic construct
  source 1..20: mol_type = other RNA
tatggacccattgccctgtt

SEQ ID NO: 5007 - RNA, 20 nt, synthetic construct
  source 1..20: mol_type = other RNA
tatggccctattgccctgtt

SEQ ID NO: 5008 - RNA, 20 nt, synthetic construct
  source 1..20: mol_type = other RNA
tatggcccgattgccctgtt

SEQ ID NO: 5009 - RNA, 20 nt, synthetic construct
  source 1..20: mol_type = other RNA
tatggcccaattgccctgtt

SEQ ID NO: 5010 - RNA, 20 nt, synthetic construct
  source 1..20: mol_type = other RNA
tatggccccattgctctgtt

SEQ ID NO: 5011 - RNA, 20 nt, synthetic construct
  source 1..20: mol_type = other RNA
tatggccccattgcactgtt

SEQ ID NO: 5012 - RNA, 20 nt, synthetic construct
  source 1..20: mol_type = other RNA
tatggccccattgcgctgtt

SEQ ID NO: 5013 - RNA, 20 nt, synthetic construct
  source 1..20: mol_type = other RNA
accaagccttcttcttgctt

SEQ ID NO: 5014 - RNA, 20 nt, synthetic construct
  source 1..20: mol_type = other RNA
agccttcttcttgctttggc

SEQ ID NO: 5015 - RNA, 20 nt, synthetic construct
  source 1..20: mol_type = other RNA
gccttcttcttgctttggca

SEQ ID NO: 5016 - RNA, 20 nt, synthetic construct
  source 1..20: mol_type = other RNA
ccttcttcttgctttggcag

SEQ ID NO: 5017 - RNA, 20 nt, synthetic construct
  source 1..20: mol_type = other RNA
tcttcttgctttggcagggg

SEQ ID NO: 5018 - RNA, 20 nt, synthetic construct
  source 1..20: mol_type = other RNA
ctaggatccagagctgccaa

SEQ ID NO: 5019 - RNA, 20 nt, synthetic construct
  source 1..20: mol_type = other RNA
caaggatccagagctgccaa

SEQ ID NO: 5020 - RNA, 20 nt, synthetic construct
  source 1..20: mol_type = other RNA
cgaggatccagagctgccaa

SEQ ID NO: 5021 - RNA, 20 nt, synthetic construct
  source 1..20: mol_type = other RNA
actaggatccagagctgcca

SEQ ID NO: 5022 - RNA, 20 nt, synthetic construct
  source 1..20: mol_type = other RNA
acaaggatccagagctgcca

SEQ ID NO: 5023 - RNA, 20 nt, synthetic construct
  source 1..20: mol_type = other RNA
acgaggatccagagctgcca

SEQ ID NO: 5024 - RNA, 20 nt, synthetic construct
  source 1..20: mol_type = other RNA
tgactccaaacagagcaatg

SEQ ID NO: 5025 - RNA, 20 nt, synthetic construct
  source 1..20: mol_type = other RNA
tgactccaaacagtgcaatg

SEQ ID NO: 5026 - RNA, 20 nt, synthetic construct
  source 1..20: mol_type = other RNA
tgactccaaacagcgcaatg

SEQ ID NO: 5027 - RNA, 20 nt, synthetic construct
  source 1..20: mol_type = other RNA
atgactccaaacagagcaat

SEQ ID NO: 5028 - RNA, 20 nt, synthetic construct
  source 1..20: mol_type = other RNA
atgactccaaacagtgcaat

SEQ ID NO: 5029 - RNA, 20 nt, synthetic construct
  source 1..20: mol_type = other RNA
atgactccaaacagcgcaat

SEQ ID NO: 5030 - RNA, 20 nt, synthetic construct
  source 1..20: mol_type = other RNA
caaatacagctcctaatacc

SEQ ID NO: 5031 - RNA, 20 nt, synthetic construct
  source 1..20: mol_type = other RNA
caaatacagctccgaatacc

SEQ ID NO: 5032 - RNA, 20 nt, synthetic construct
  source 1..20: mol_type = other RNA
caaatacagctccaaatacc

SEQ ID NO: 5033 - RNA, 20 nt, synthetic construct
  source 1..20: mol_type = other RNA
caaatacagctcccaatact

SEQ ID NO: 5034 - RNA, 20 nt, synthetic construct
  source 1..20: mol_type = other RNA
caaatacagctcccaatacg

SEQ ID NO: 5035 - RNA, 20 nt, synthetic construct
  source 1..20: mol_type = other RNA
caaatacagctcccaataca

SEQ ID NO: 5036-6000 - skipped (965 entries)

SEQ ID NO: 6001 - RNA, 16 nt, synthetic construct
  source 1..16: mol_type = other RNA
ctatgactccaaacag

SEQ ID NO: 6002 - skipped

SEQ ID NO: 6003 - RNA, 24 nt, synthetic construct
  source 1..24: mol_type = other RNA
ccaaacagggcaatggggccatac

SEQ ID NO: 6004 - RNA, 26 nt, synthetic construct
  source 1..26: mol_type = other RNA
ctccaaacagggcaatggggccatac

SEQ ID NO: 6005 - RNA, 13 nt, synthetic construct
  source 1..13: mol_type = other RNA
cattgctctgttt

SEQ ID NO: 6006 - RNA, 13 nt, synthetic construct
  source 1..13: mol_type = other RNA
cattgcgctgttt

SEQ ID NO: 6007 - RNA, 13 nt, synthetic construct
  source 1..13: mol_type = other RNA
cattgcactgttt

SEQ ID NO: 6008 - RNA, 14 nt, synthetic construct
  source 1..14: mol_type = other RNA
ccattgctctgttt

SEQ ID NO: 6009 - RNA, 14 nt, synthetic construct
  source 1..14: mol_type = other RNA
ccattgcgctgttt

SEQ ID NO: 6010 - RNA, 14 nt, synthetic construct
  source 1..14: mol_type = other RNA
ccattgcactgttt

SEQ ID NO: 6011 - RNA, 15 nt, synthetic construct
  source 1..15: mol_type = other RNA
cccattgctctgttt

SEQ ID NO: 6012 - RNA, 15 nt, synthetic construct
  source 1..15: mol_type = other RNA
cccattgcgctgttt

SEQ ID NO: 6013 - RNA, 15 nt, synthetic construct
  source 1..15: mol_type = other RNA
cccattgcactgttt

SEQ ID NO: 6014 - RNA, 16 nt, synthetic construct
  source 1..16: mol_type = other RNA
ccccattgctctgttt

SEQ ID NO: 6015 - RNA, 16 nt, synthetic construct
  source 1..16: mol_type = other RNA
ccccattgcgctgttt

SEQ ID NO: 6016 - RNA, 16 nt, synthetic construct
  source 1..16: mol_type = other RNA
ccccattgcactgttt

SEQ ID NO: 6017 - RNA, 16 nt, synthetic construct
  source 1..16: mol_type = other RNA
ccccattgccctgttt

SEQ ID NO: 6018 - RNA, 13 nt, synthetic construct
  source 1..13: mol_type = other RNA
cattgccctgttt

SEQ ID NO: 6019 - RNA, 14 nt, synthetic construct
  source 1..14: mol_type = other RNA
ccattgccctgttt

SEQ ID NO: 6020 - RNA, 15 nt, synthetic construct
  source 1..15: mol_type = other RNA
cccattgccctgttt

SEQ ID NO: 6021 - protein, 18 aa, synthetic construct
KRTADGSEFESPKKKRKV

SEQ ID NO: 6022 - protein, 17 aa, synthetic construct
KRTADGSEFEPKKKRKV

SEQ ID NO: 6023 - protein, 19 aa, synthetic construct
NLSKRPAAIKKAGQAKKKK

SEQ ID NO: 6024 - protein, 11 aa, synthetic construct
RQRRNELKRSF

SEQ ID NO: 6025 - protein, 38 aa, synthetic construct; identical to SEQ ID NO: 12

SEQ ID NO: 6026 - protein, 16 aa, synthetic construct
KRXXXXXXXXXXKKKL

SEQ ID NO: 6027 - protein, 16 aa, synthetic construct
KRPAATKKAGQAKKKK

SEQ ID NO: 6028 - protein, 34 aa, synthetic construct
SGGSSGGSKRTADGSEFESPKKKRKVSGGSSGGS

SEQ ID NO: 6029 - protein, 22 aa, synthetic construct
SGGSKRTADGSEFESPKKKRKV

SEQ ID NO: 6030 - protein, 12 aa, synthetic construct
GSGPAAKRVKLD

SEQ ID NO: 6031 - protein, 2131 aa, synthetic construct
MKRTADGSEFESPKKKRKVDKKYSIGLDIGTNSVGWAVITDEYKVPSKKFKVLGNTDRHSIKKNLIGALLFDSGETAEATRLKRTARRRYTRRKNRICYLQEIFSNEMAKVDDSFFHRLEESFLVEEDKKHERHPIFGNIVDEVAYHEKYPTIYHLRKKLVDSTDKADLRLIYLALAHMIKFRGHFLIEGDLNPDNSDVDKLFIQLVQTYNQLFEENPINASGVDAKAILSARLSKSRKLENLIAQLPGEKKNGLFGNLIALSLGLTPNFKSNFDLAEDAKLQLSKDTYDDDLDNLLAQIGDQYADLFLAAKNLSDAILLSDILRVNTEITKAPLSASMIKRYDEHHQDLTLLKALVRQQLPEKYKEIFFDQSKNGYAGYIDGGASQEEFYKFIKPILEKMDGTEELLVKLKREDLLRKQRTFDNGSIPHQIHLGELHAILRRQEDFYPFLKDNREKIEKILTFRIPYYVGPLARGNSRFAWMTRKSEETITPWNFEEVVDKGASAQSFIERMTNFDKNLPNEKVLPKHSLLYEYFTVYNELTKVKYVTEGMRKPAFLSGEQKKAIVDLLFKTNRKVTVKQLKEDYFKKIECFDSVEISGVEDRFNASLGTYHDLLKIIKDKDFLDNEENEDILEDIVLTLTLFEDREMIEERLKTYAHLFDDKVMKQLKRRRYTGWGRLSRKLINGIRDKQSGKTILDFLKSDGFANRNFMQLIHDDSLTFKEDIQKAQVSGQGDSLHEHIANLAGSPAIKKGILQTVKVVDELVKVMGRHKPENIVIEMARENQTTQKGQKNSRERMKRIEEGIKELGSQILKEHPVENTQLQNEKLYLYYLQNGRDMYVDQELDINRLSDYDVDAIVPQSFLKDDSIDNKVLTRSDKNRGKSDNVPSEEVVKKMKNYWRQLLNAKLITQRKFDNLTKAERGGLSELDKAGFIKRQLVETRQITKHVAQILDSRMNTKYDENDKLIREVKVITLKSKLVSDFRKDFQFYKVREINNYHHAHDAYLNAVVGTALIKKYPKLESEFVYGDYKVYDVRKMIAKSEQEIGKATAKYFFYSNIMNFFKTEITLANGEIRKRPLIETNGETGEIVWDKGRDFATVRKVLSMPQVNIVKKTEVQTGGFSKESILPKRNSDKLIARKKDWDPKKYGGFDSPTVAYSVLVVAKVEKGKSKKLKSVKELLGITIMERSSFEKNPIDFLEAKGYKEVKKDLIIKLPKYSLFELENGRKRMLASAGELQKGNELALPSKYVNFLYLASHYEKLKGSPEDNEQKQLFVEQHKHYLDEIIEQISEFSKRVILADANLDKVLSAYNKHRDKPIREQAENIIHLFTLTNLGAPAAFKYFDTTIDRKRYTSTKEVLDATLIHQSITGLYETRIDLSQLGGDSGGSSGGSKRTADGSEFESPKKKRKVSGGSSGGSTLNIEDEYRLHETSKEPDVSLGSTWLSDFPQAWAETGGMGLAVRQAPLIIPLKATSTPVSIKQYPMSQEARLGIKPHIQRLLDQGILVPCQSPWNTPLLPVKKPGTNDYRPVQDLREVNKRVEDIHPTVPNPYNLLSGLPPSHQWYTVLDLKDAFFCLRLHPTSQPLFAFEWRDPEMGISGQLTWTRLPQGFKNSPTLFNEALHRDLADFRIQHPDLILLQYVDDLLLAATSELDCQQGTRALLQTLGNLGYRASAKKAQICQKQVKYLGYLLKEGQRWLTEARKETVMGQPTPKTPRQLREFLGKAGFCRLFIPGFAEMAAPLYPLTKPGTLFNWGPDQQKAYQEIKQALLTAPALGLPDLTKPFELFVDEKQGYAKGVLTQKLGPWRRPVAYLSKKLDPVAAGWPPCLRMVAAIAVLTKDAGKLTMGQPLVILAPHAVEALVKQPPDRWLSNARMTHYQALLLDTDRVQFGPVVALNPATLLPLPEEGLQHNCLDILAEAHGTRPDLTDQPLPDADHTWYTDGSSLLQEGQRKAGAAVTTETEVIWAKALPAGTSAQRAELIALTQALKMAEGKKLNVYTDSRYAFATAHIHGEIYRRRGWLTSEGKEIKNKDEILALLKALFLPKRLSIIHCPGHQKGHSAEARGNRMADQAARKAAITETPDTSTLLIENSSPSGGSKRTADGSEFESPKKKRKVGSGPAAKRVKLD

SEQ ID NO: 6032 - protein, 19 aa, synthetic construct
MKRTADGSEFESPKKKRKV

SEQ ID NO: 6033 - protein, 1367 aa, synthetic construct
DKKYSIGLDIGTNSVGWAVITDEYKVPSKKFKVLGNTDRHSIKKNLIGALLFDSGETAEATRLKRTARRRYTRRKNRICYLQEIFSNEMAKVDDSFFHRLEESFLVEEDKKHERHPIFGNIVDEVAYHEKYPTIYHLRKKLVDSTDKADLRLIYLALAHMIKFRGHFLIEGDLNPDNSDVDKLFIQLVQTYNQLFEENPINASGVDAKAILSARLSKSRKLENLIAQLPGEKKNGLFGNLIALSLGLTPNFKSNFDLAEDAKLQLSKDTYDDDLDNLLAQIGDQYADLFLAAKNLSDAILLSDILRVNTEITKAPLSASMIKRYDEHHQDLTLLKALVRQQLPEKYKEIFFDQSKNGYAGYIDGGASQEEFYKFIKPILEKMDGTEELLVKLKREDLLRKQRTFDNGSIPHQIHLGELHAILRRQEDFYPFLKDNREKIEKILTFRIPYYVGPLARGNSRFAWMTRKSEETITPWNFEEVVDKGASAQSFIERMTNFDKNLPNEKVLPKHSLLYEYFTVYNELTKVKYVTEGMRKPAFLSGEQKKAIVDLLFKTNRKVTVKQLKEDYFKKIECFDSVEISGVEDRFNASLGTYHDLLKIIKDKDFLDNEENEDILEDIVLTLTLFEDREMIEERLKTYAHLFDDKVMKQLKRRRYTGWGRLSRKLINGIRDKQSGKTILDFLKSDGFANRNFMQLIHDDSLTFKEDIQKAQVSGQGDSLHEHIANLAGSPAIKKGILQTVKVVDELVKVMGRHKPENIVIEMARENQTTQKGQKNSRERMKRIEEGIKELGSQILKEHPVENTQLQNEKLYLYYLQNGRDMYVDQELDINRLSDYDVDAIVPQSFLKDDSIDNKVLTRSDKNRGKSDNVPSEEVVKKMKNYWRQLLNAKLITQRKFDNLTKAERGGLSELDKAGFIKRQLVETRQITKHVAQILDSRMNTKYDENDKLIREVKVITLKSKLVSDFRKDFQFYKVREINNYHHAHDAYLNAVVGTALIKKYPKLESEFVYGDYKVYDVRKMIAKSEQEIGKATAKYFFYSNIMNFFKTEITLANGEIRKRPLIETNGETGEIVWDKGRDFATVRKVLSMPQVNIVKKTEVQTGGFSKESILPKRNSDKLIARKKDWDPKKYGGFDSPTVAYSVLVVAKVEKGKSKKLKSVKELLGITIMERSSFEKNPIDFLEAKGYKEVKKDLIIKLPKYSLFELENGRKRMLASAGELQKGNELALPSKYVNFLYLASHYEKLKGSPEDNEQKQLFVEQHKHYLDEIIEQISEFSKRVILADANLDKVLSAYNKHRDKPIREQAENIIHLFTLTNLGAPAAFKYFDTTIDRKRYTSTKEVLDATLIHQSITGLYETRIDLSQLGGD

SEQ ID NO: 6034 - protein, 677 aa, synthetic construct; identical to SEQ ID NO: 49

SEQ ID NO: 6035 - DNA, 76 bp, synthetic construct
  source 1..76: mol_type = other DNA
gttttagagctagaaatagcaagttaaaataaggctagtccgttatcaacttgaaaaagtggcaccgagtcggtgc

SEQ ID NO: 6036 - DNA, 76 bp, synthetic construct
  source 1..76: mol_type = other DNA
gtttgagagctagaaatagcaagtttaaataaggctagtccgttatcaacttgaaaaagtgggaccgagtcggtcc

SEQ ID NO: 6037 - DNA, 86 bp, synthetic construct
  source 1..86: mol_type = other DNA
gtttaagagctatgctggaaacagcatagcaagtttaaataaggctagtccgttatcaacttgaaaaagtggcaccgagtcggtgc

SEQ ID NO: 6038 - RNA, 55 nt, synthetic construct
  source 1..55: mol_type = other RNA
gggtcaggagccccccccctgaacccaggataaccctcaaagtcggggggcaacc

SEQ ID NO: 6039 - RNA, 56 nt, synthetic construct
  source 1..56: mol_type = other RNA
gggtcaggagccccccccctgaacccaggaaaaccctcaaagtcggggggcaaccc

SEQ ID NO: 6040 - RNA, 56 nt, synthetic construct
  source 1..56: mol_type = other RNA
gggtcaggagccccccccctgcacccaggaaaaccctcaaagtcggggggcaaccc

SEQ ID NO: 6041 - RNA, 56 nt, synthetic construct
  source 1..56: mol_type = other RNA
gggtcaggagccccccccctgcacccaggataaccctcaaagtcggggggcaaccc

SEQ ID NO: 6042 - protein, 16 aa, Drosophila melanogaster
RQIKIWFQNRRMKWKK

SEQ ID NO: 6043 - RNA, 20 nt, synthetic construct
  source 1..20: mol_type = other RNA
tcgttggctatgactccaaa

SEQ ID NO: 6044 - RNA, 20 nt, synthetic construct
  source 1..20: mol_type = other RNA
gttgggaggggcactctcgt

SEQ ID NO: 6045 - RNA, 20 nt, synthetic construct
  source 1..20: mol_type = other RNA
ggtgccacacaagttgggag

SEQ ID NO: 6046 - RNA, 20 nt, synthetic construct
  source 1..20: mol_type = other RNA
cgtatggccccattgccgtt

SEQ ID NO: 6047 - RNA, 20 nt, synthetic construct
  source 1..20: mol_type = other RNA
gtatttggtttctcctcgta

SEQ ID NO: 6048 - RNA, 20 nt, synthetic construct
  source 1..20: mol_type = other RNA
ctggtattgggagctgtatt

SEQ ID NO: 6049 - RNA, 10 nt, synthetic construct
  source 1..10: mol_type = other RNA
tgccctgttt

SEQ ID NO: 6050 - RNA, 10 nt, synthetic construct
  source 1..10: mol_type = other RNA
tgcactgttt

SEQ ID NO: 6051 - RNA, 10 nt, synthetic construct
  source 1..10: mol_type = other RNA
tgcgctgttt

SEQ ID NO: 6052 - RNA, 10 nt, synthetic construct
  source 1..10: mol_type = other RNA
tgctctgttt

SEQ ID NO: 6053 - RNA, 11 nt, synthetic construct
  source 1..11: mol_type = other RNA
ttgccctgttt

SEQ ID NO: 6054 - RNA, 11 nt, synthetic construct
  source 1..11: mol_type = other RNA
ttgcactgttt

SEQ ID NO: 6055 - RNA, 11 nt, synthetic construct
  source 1..11: mol_type = other RNA
ttgcgctgttt

SEQ ID NO: 6056 - RNA, 11 nt, synthetic construct
  source 1..11: mol_type = other RNA
ttgctctgttt

SEQ ID NO: 6057 - RNA, 12 nt, synthetic construct
  source 1..12: mol_type = other RNA
attgccctgttt

SEQ ID NO: 6058 - RNA, 12 nt, synthetic construct
  source 1..12: mol_type = other RNA
attgcactgttt

SEQ ID NO: 6059 - RNA, 12 nt, synthetic construct
  source 1..12: mol_type = other RNA
attgcgctgttt

SEQ ID NO: 6060 - RNA, 12 nt, synthetic construct
  source 1..12: mol_type = other RNA
attgctctgttt

SEQ ID NO: 6061 - RNA, 17 nt, synthetic construct
  source 1..17: mol_type = other RNA
gccccattgccctgttt

SEQ ID NO: 6062 - RNA, 17 nt, synthetic construct
  source 1..17: mol_type = other RNA
gccccattgcactgttt

SEQ ID NO: 6063 - RNA, 17 nt, synthetic construct
  source 1..17: mol_type = other RNA
gccccattgcgctgttt

SEQ ID NO: 6064 - RNA, 17 nt, synthetic construct
  source 1..17: mol_type = other RNA
gccccattgctctgttt

SEQ ID NO: 6065 - RNA, 18 nt, synthetic construct
  source 1..18: mol_type = other RNA
ggccccattgccctgttt

SEQ ID NO: 6066 - RNA, 18 nt, synthetic construct
  source 1..18: mol_type = other RNA
ggccccattgcactgttt

SEQ ID NO: 6067 - RNA, 18 nt, synthetic construct
  source 1..18: mol_type = other RNA
ggccccattgcgctgttt

SEQ ID NO: 6068 - RNA, 18 nt, synthetic construct
  source 1..18: mol_type = other RNA
ggccccattgctctgttt

SEQ ID NO: 6069 - RNA, 23 nt, synthetic construct
  source 1..23: mol_type = other RNA
  misc_difference 20..23: note = Nucleotides may be deleted
tgggagacgtcccaccttttttt

SEQ ID NO: 6070 - RNA, 19 nt, synthetic construct
  source 1..19: mol_type = other RNA
tggccccattgcactgttt

SEQ ID NO: 6071 - RNA, 28 nt, synthetic construct
  source 1..28: mol_type = other RNA
ccatcagttgacaccctgaggttttttt

SEQ ID NO: 6072 - RNA, 19 nt, synthetic construct
  source 1..19: mol_type = other RNA
tggccccattgctctgttt

SEQ ID NO: 6073 - RNA, 31 nt, synthetic construct
  source 1..31: mol_type = other RNA
catgcgattagaaataatcgcatgttttttt

SEQ ID NO: 6074 - RNA, 118 nt, synthetic construct
  source 1..118: mol_type = other RNA
tctgccatcaaagctgcgaccgtgctcagtctggtgggagacgtcccaccggccggcatggtcccagcctcctcgctggcgccggctgggcaacatgcttcggcatggcgaatgggac

SEQ ID NO: 6075 - RNA, 76 nt, synthetic construct
  source 1..76: mol_type = other RNA
gttttagagctatacgtagcaagttaaaataaggctagtccgttatcaactttacgaagtgggaccgagtcggtcc

SEQ ID NO: 6076 - RNA, 20 nt, synthetic construct
  source 1..20: mol_type = other RNA
atggccccattgctctgttt

SEQ ID NO: 6077 - RNA, 21 nt, synthetic construct
  source 1..21: mol_type = other RNA
tatggccccattgccctgttt

SEQ ID NO: 6078 - RNA, 22 nt, synthetic construct
  source 1..22: mol_type = other RNA
gtatggccccattgccctgttt

SEQ ID NO: 6079 - RNA, 19 nt, synthetic construct
  source 1..19: mol_type = other RNA
tggccccattgccctgttt

SEQ ID NO: 6080 - RNA, 19 nt, synthetic construct
  source 1..19: mol_type = other RNA
tggccccattgcgctgttt

SEQ ID NO: 6081 - RNA, 20 nt, synthetic construct
  source 1..20: mol_type = other RNA
atggccccattgccctgttt

SEQ ID NO: 6082 - RNA, 20 nt, synthetic construct
  source 1..20: mol_type = other RNA
atggccccattgcgctgttt

SEQ ID NO: 6083 - RNA, 20 nt, synthetic construct
  source 1..20: mol_type = other RNA
gccaaagcaagaagaaggct

SEQ ID NO: 6084 - protein, 9 aa, synthetic construct
RRRRRRRRR

SEQ ID NO: 6085 - protein, 8 aa, synthetic construct
RRRRRRRR

SEQ ID NO: 6086 - RNA, 23 nt, synthetic construct
  source 1..23: mol_type = other RNA
gaaaccaaatacagctcctaata

SEQ ID NO: 6087 - RNA, 23 nt, synthetic construct
  source 1..23: mol_type = other RNA
gaaaccaaatacagctccgagta

SEQ ID NO: 6088 - RNA, 23 nt, synthetic construct
  source 1..23: mol_type = other RNA
gaaaccaaatacagctcccaata

SEQ ID NO: 6089 - RNA, 23 nt, synthetic construct
  source 1..23: mol_type = other RNA
gaaaccaaatacagctccaagta

SEQ ID NO: 6090 - RNA, 10 nt, synthetic construct
  source 1..10: mol_type = other RNA
tgccctgttt

SEQ ID NO: 6091 - RNA, 10 nt, synthetic construct
  source 1..10: mol_type = other RNA
tgcactgttt

SEQ ID NO: 6092 - RNA, 10 nt, synthetic construct
  source 1..10: mol_type = other RNA
tgcgctgttt

SEQ ID NO: 6093 - RNA, 10 nt, synthetic construct
  source 1..10: mol_type = other RNA
tgctctgttt

SEQ ID NO: 6094 - RNA, 11 nt, synthetic construct
  source 1..11: mol_type = other RNA
ttgccctgttt

SEQ ID NO: 6095 - RNA, 11 nt, synthetic construct
  source 1..11: mol_type = other RNA
ttgcactgttt

SEQ ID NO: 6096 - RNA, 11 nt, synthetic construct
  source 1..11: mol_type = other RNA
ttgcgctgttt

SEQ ID NO: 6097 - RNA, 11 nt, synthetic construct
  source 1..11: mol_type = other RNA
ttgctctgttt

SEQ ID NO: 6098 - RNA, 12 nt, synthetic construct
  source 1..12: mol_type = other RNA
attgccctgttt

SEQ ID NO: 6099 - RNA, 12 nt, synthetic construct
  source 1..12: mol_type = other RNA
attgcactgttt

SEQ ID NO: 6100 - RNA, 12 nt, synthetic construct
  source 1..12: mol_type = other RNA
attgcgctgttt

SEQ ID NO: 6101 - RNA, 12 nt, synthetic construct
  source 1..12: mol_type = other RNA
attgctctgttt

SEQ ID NO: 6102 - RNA, 17 nt, synthetic construct
  source 1..17: mol_type = other RNA
gccccattgccctgttt

SEQ ID NO: 6103 - RNA, 17 nt, synthetic construct
  source 1..17: mol_type = other RNA
gccccattgcactgttt

SEQ ID NO: 6104 - RNA, 17 nt, synthetic construct
  source 1..17: mol_type = other RNA
gccccattgcgctgttt

SEQ ID NO: 6105 - RNA, 17 nt, synthetic construct
  source 1..17: mol_type = other RNA
gccccattgctctgttt

SEQ ID NO: 6106 - RNA, 18 nt, synthetic construct
  source 1..18: mol_type = other RNA
ggccccattgccctgttt

SEQ ID NO: 6107 - RNA, 18 nt, synthetic construct
  source 1..18: mol_type = other RNA
ggccccattgcactgttt

SEQ ID NO: 6108 - RNA, 18 nt, synthetic construct
  source 1..18: mol_type = other RNA
ggccccattgcgctgttt

SEQ ID NO: 6109 - RNA, 18 nt, synthetic construct
  source 1..18: mol_type = other RNA
ggccccattgctctgttt

SEQ ID NO: 6110 - RNA, 19 nt, synthetic construct
  source 1..19: mol_type = other RNA
tggccccattgccctgttt

SEQ ID NO: 6111 - RNA, 19 nt, synthetic construct
  source 1..19: mol_type = other RNA
tggccccattgcactgttt

SEQ ID NO: 6112 - RNA, 19 nt, synthetic construct
  source 1..19: mol_type = other RNA
tggccccattgcgctgttt

SEQ ID NO: 6113 - RNA, 19 nt, synthetic construct
  source 1..19: mol_type = other RNA
tggccccattgctctgttt

SEQ ID NO: 6114 - RNA, 20 nt, synthetic construct
  source 1..20: mol_type = other RNA
atggccccattgccctgttt

SEQ ID NO: 6115 - RNA, 20 nt, synthetic construct
  source 1..20: mol_type = other RNA
atggccccattgcactgttt

SEQ ID NO: 6116 - RNA, 20 nt, synthetic construct
  source 1..20: mol_type = other RNA
atggccccattgcgctgttt

SEQ ID NO: 6117 - RNA, 20 nt, synthetic construct
  source 1..20: mol_type = other RNA
atggccccattgctctgttt

SEQ ID NO: 6118 - RNA, 21 nt, synthetic construct
  source 1..21: mol_type = other RNA
tatggccccattgccctgttt

SEQ ID NO: 6119 - RNA, 22 nt, synthetic construct
  source 1..22: mol_type = other RNA
gtatggccccattgccctgttt

SEQ ID NO: 6120 - RNA, 75 nt, synthetic construct
  source 1..75: mol_type = other RNA
  misc_difference 72..75: note = Nucleotides may be deleted
ggccggcatggtcccagcctcctcgctggcgccggctgggcaacatgcttcggcatggcgaatgggacttttttt

SEQ ID NO: 6121 - RNA, 28 nt, synthetic construct
  source 1..28: mol_type = other RNA
  misc_difference 25..28: note = Nucleotides may be deleted
ccatcagttgacaccctgaggttttttt

SEQ ID NO: 6122 - RNA, 31 nt, synthetic construct; identical to SEQ ID NO: 6073
  source 1..31: mol_type = other RNA
  misc_difference 28..31: note = Nucleotides may be deleted
